(19) United States
(12) Patent Application Publication
(10) Pub. No.: US 2022/0260552 A1
(43) Pub. Date: Aug. 18, 2022

(54) Methods to determine the effect of an agent on mammalian embryonic development

(71) Applicant: Toxys B.V., Oegstgeest (NL)

(72) Inventors: Giel Hendriks, Rotterdam (NL); Inger Brandsma, Delfgauw (NL); Péter Imre Racz, Rijnsburg (NL)

(21) Appl. No.: 17/627,853

(22) PCT Filed: Jul. 17, 2020
(86) PCT No.: PCT/NL2020/050471

§ 371 Date: Jan. 18, 2022

(30) Foreign Application Priority Data
Jul. 19, 2019 (NL) 2023536

(51) Int. Cl. G01N 33/50; C12N 15/113

(52) U.S. Cl. CPC G01N 33/5023; C12N 15/113

(57) ABSTRACT

The invention relates to the fields of developmental toxicity. In particular, it relates to novel reporter cell types that may be used in in vitro methods to determine the effect of an agent on mammalian embryonic development.

### FIELD OF THE INVENTION

[0001] The invention relates to the field of developmental toxicity. In particular, it relates to novel reporter cell types that may be used in in vitro methods to determine the effect of an agent on mammalian embryonic development.

### BACKGROUND OF THE INVENTION

[0002] Embryonic development of organisms follows an extremely accurate pattern of differentiation processes, starting with early differentiation of embryonic stem cells into three primary germ cell lineages (ectoderm, mesoderm and endoderm). All the different tissues of the adult organism are derived from these three lineages. The differentiation process that is responsible for the transformation of the germ cells into the different cell types needed for these tissues, is a tightly timed and controlled process that is highly evolutionary conserved between species. Perturbation of differentiation processes by exposure to chemicals and xenobiotics may interfere with embryonic development and can result in severe birth defects, including physical malformations, abnormal behavior and cognitive problems.

[0003] Testing for disruption of embryonic development is a crucial part of toxicological risk assessment for novel compounds. Regulatory agencies demand rigorous testing of all novel compounds for potential developmental toxicity effects for humans, prior to releasing new products to the market. Currently, developmental and reproductive toxicity (DART) tests are heavily depending on in vivo studies (OECD TG 414, OECD TG 415, OECD TG 416, OECD TG 421, OECD TG 422).

[0004] As an alternative to these standard in vivo studies, several innovative in vitro studies have been developed. In vitro assays can be performed in a shorter timeframe than in vivo studies and help to significantly reduce the number of animals required for testing by removing agents causing developmental toxicity in vitro from the testing process in vivo. Furthermore, in vitro assays allow for high-throughput screening of multiple compounds during early screening processes to enable early prioritization, optimization and selection of compounds.

[0005] Various in vitro approaches have been developed to partly replace the in vivo reproductive toxicity test. An in vitro assay based on mouse cells is the embryonic stem cell test (EST). In the EST embryonic stem cells are differentiated towards functional beating cardiomyocytes while the cells are treated with the test compound during the complete differentiation process (Ellis-hutchings et al, 2010). Developmental toxicity is defined as a reduction of the number of beating cardiomyocytes after exposure to a test substance. The EST has a number of important limitations, including the lack of homogeneity of the differentiated population, the unpredictability and difficulties in quantification of the result. Furthermore, human specific teratogens, such as thalidomide, cannot be detected.

[0006] Another well-known approach is the Whole Embryo Culture (WEC), wherein complete rat embryos of approximately day 10 of gestation are cultured and exposed to potential toxins for up to 48 hours. Afterwards, cell viability, embryo function, growth and morphology are the endpoints deciding the toxic effects of the possibly teratogenic compounds. However, WEC has several disadvantages amongst them the technical requirements and the short culture duration which can cause misinterpretation of results, especially in classifying weak teratogens (Ellis-hutchings supra, Piersma et al 1993).

[0007] Another method to measure developmental toxicity is the ReProGlo stem cell-based Wnt reporter assay. This assay is based on the Wnt/β-catenin pathway, which plays a pivotal role in embryonic development. As the level of Wnt signalling can be measured by luciferase activity, a luciferase reporter is made to identify compounds affecting the Wnt pathway. Although the assay is accurate in rejecting false positives, it has a relatively high number of false negatives (Uibel and Schwarz, 2015). Thus, the Wnt reporter assay is not reliable enough to become the leading assay to test teratogenicity.

[0008] Thus, although in the last decades various in vitro assays have been developed, improving the field of developmental toxicity, most of these tests have only a low predictive value for human risk assessments and are only able to partially replace the existing in vivo tests. The demand for innovative in vitro assays which are easy-to-use and have a high predictive value for humans remains.

### SUMMARY OF THE INVENTION

[0009] In a first aspect, the invention provides for an in vitro method of determining an effect of an agent on mammalian embryonic development, the method comprising:

[0010] a) providing one or more types of reporter cells, wherein each type of reporter cell comprises a reporter sequence operatively linked to a different regulatory element of a gene;

[0011] b) contacting the one or more type of reporter cells with the agent;

[0012] c) comparing the expression of the reporter sequences in the one or more types of reporter cells contacted with the agent to a corresponding cell not contacted with the agent; and

[0013] d) determining that the agent has an effect on mammalian embryonic development if in step c) a difference in expression of the reporter sequences is detected between the reporter cells contacted with the agent and the corresponding cells not contacted with the agent for at least one type of reporter cell; and,

wherein the different regulatory elements for each type of reporter cell is selected from the group consisting of:
[0014] a regulatory element of the OCT4 gene comprising a polynucleotide sequence that has at least 60% sequence identity with at least one of SEQ ID NO: 1 and SEQ ID NO: 21;
[0015] a regulatory element of the BMP4 gene, comprising a polynucleotide sequence that has at least 60% sequence identity at least one of SEQ ID NO: 2 and SEQ ID NO: 22;
[0016] a regulatory element of the MYH6 gene, comprising a polynucleotide sequence that has at least 60% sequence identity with at least one of SEQ ID NO: 3 and SEQ ID NO:23;
[0017] a regulatory element of the PAX6 gene, comprising a polynucleotide sequence that has at least 60% sequence identity with at least one of SEQ ID NO: 4 and SEQ ID NO: 24;
[0018] a regulatory element of the FOXA2 gene, comprising a polynucleotide sequence that has at least 60% sequence identity with at least one of SEQ ID NO: 5 and SEQ ID NO: 25;
[0019] a regulatory element of the SOX17 gene, comprising a polynucleotide sequence that has at least 60% sequence identity with at least one of SEQ ID NO: 6 and SEQ ID NO: 26;
[0020] a regulatory element of the ALB gene, comprising a polynucleotide sequence that has at least 60% sequence identity with at least one of SEQ ID NO: 7 and SEQ ID NO: 27;
[0021] a regulatory element of the AFP gene, comprising a polynucleotide sequence that has at least 60% sequence identity with at least one of SEQ ID NO: 8 and SEQ ID NO: 28;
[0022] a regulatory element of the Ck18 gene comprising a polynucleotide sequence that has at least 60% sequence identity with at least one of SEQ ID NO: 9 and SEQ ID NO: 29;
[0023] a regulatory element of the Vegfr1 gene comprising a polynucleotide sequence that has at least 60% sequence identity with at least one of SEQ ID NO: 10 and SEQ ID NO: 30; and
[0024] a regulatory element of the SOX1 gene comprising a polynucleotide sequence that has at least 60% sequence identity with at least one of SEQ ID NO: 101 and SEQ ID NO: 103.

[0025] In a preferred embodiment, the method of the invention comprises contacting at least seven types of reporter cells with the agent in step b), wherein the at least seven reporter cells consist of a reporter cell comprising the regulatory element of OCT4 as herein described, a reporter cell comprising the regulatory element of BMP4 as herein described, a reporter cell comprising the regulatory element of MYH6 as herein described, a reporter cell comprising the regulatory element of FOXA2 as herein described, a reporter cell comprising the regulatory element of AFP as herein described, a reporter cell comprising the regulatory element of SOX1 as herein described, a reporter cell comprising the regulatory element of PAX6 as herein described,

[0026] In a second aspect, the invention provides for kit of parts comprising:
[0027] one or more types of reporter cell, wherein each type of reporter cell comprises a reporter sequence operatively linked to a regulatory element of a gene and wherein the one or more type of reporter cells each comprise a different regulatory element selected from:
[0028] a regulatory element of the OCT4 gene comprising a polynucleotide sequence that has at least 60% sequence identity with at least one of SEQ ID NO: 1 and SEQ ID NO: 21;
[0029] a regulatory element of the BMP4 gene, comprising a polynucleotide sequence that has at least 60% sequence identity at least one of SEQ ID NO: 2 and SEQ ID NO: 22;
[0030] a regulatory element of the MYH6 gene, comprising a polynucleotide sequence that has at least 60% sequence identity with at least one of SEQ ID NO: 3 and SEQ ID NO:23;
[0031] a regulatory element of the PAX6 gene, comprising a polynucleotide sequence that has at least 60% sequence identity with at least one of SEQ ID NO: 4 and SEQ ID NO: 24;
[0032] a regulatory element of the FOXA2 gene, comprising a polynucleotide sequence that has at least 60% sequence identity with at least one of SEQ ID NO: 5 and SEQ ID NO: 25;
[0033] a regulatory element of the SOX17 gene, comprising a polynucleotide sequence that has at least 60% sequence identity with at least one of SEQ ID NO: 6 and SEQ ID NO: 26;
[0034] a regulatory element of the ALB gene, comprising a polynucleotide sequence that has at least 60% sequence identity with at least one of SEQ ID NO: 7 and SEQ ID NO: 27;
[0035] a regulatory element of the AFP gene, comprising a polynucleotide sequence that has at least 60% sequence identity with at least one of SEQ ID NO: 8 and SEQ ID NO: 28;
[0036] a regulatory element of the Ck18 gene comprising a polynucleotide sequence that has at least 60% sequence identity with at least one of SEQ ID NO: 9 and SEQ ID NO: 29;
[0037] a regulatory element of the Vegfr1 gene comprising a polynucleotide sequence that has at least 60% sequence identity with at least one of SEQ ID NO: 10 and SEQ ID NO: 30; and
[0038] a regulatory element of the SOX1 gene comprising a polynucleotide sequence that has at least 60% sequence identity with at least one of SEQ ID NO: 101 and SEQ ID NO: 103.

[0039] In a preferred embodiment, the kit of parts of the invention comprises at least seven types of reporter cells consisting of a reporter cell comprising the regulatory element of OCT4 as herein described, a reporter cell comprising the regulatory element of BMP4 as herein described, a reporter cell comprising the regulatory element of MYH6 as herein described, a reporter cell comprising the regulatory element of FOXA2 as herein described, a reporter cell comprising the regulatory element of AFP as herein described, a reporter cell comprising the regulatory element of SOX1 as herein described, a reporter cell comprising the regulatory element of PAX6 as herein described.

[0040] In a third aspect, the invention provides for a combination of at least two transgenic non-human mammals, preferably rodents, comprising at least one cell comprising a reporter sequence operatively linked to a different regulatory element and wherein the regulatory element is selected from:
[0041] a regulatory element of the OCT4 gene comprising a polynucleotide sequence that has at least 60% sequence identity with at least one of SEQ ID NO: 1 and SEQ ID NO: 21;
[0042] a regulatory element of the BMP4 gene, comprising a polynucleotide sequence that has at least 60% sequence identity at least one of SEQ ID NO: 2 and SEQ ID NO: 22;
[0043] a regulatory element of the MYH6 gene, comprising a polynucleotide sequence that has at least 60% sequence identity with at least one of SEQ ID NO: 3 and SEQ ID NO: 23;
[0044] a regulatory element of the PAX6 gene, comprising a polynucleotide sequence that has at least 60% sequence identity with at least one of SEQ ID NO: 4 and SEQ ID NO: 24;
[0045] a regulatory element of the FOXA2 gene, comprising a polynucleotide sequence that has at least 60% sequence identity with at least one of SEQ ID NO: 5 and SEQ ID NO: 25;
[0046] a regulatory element of the SOX17 gene, comprising a polynucleotide sequence that has at least 60% sequence identity with at least one of SEQ ID NO: 6 and SEQ ID NO: 26;
[0047] a regulatory element of the ALB gene, comprising a polynucleotide sequence that has at least 60% sequence identity with at least one of SEQ ID NO: 7 and SEQ ID NO: 27;
[0048] a regulatory element of the AFP gene, comprising a polynucleotide sequence that has at least 60% sequence identity with at least one of SEQ ID NO: 8 and SEQ ID NO: 28;
[0049] a regulatory element of the Ck18 gene comprising a polynucleotide sequence that has at least 60% sequence identity with at least one of SEQ ID NO: 9 and SEQ ID NO: 29;
[0050] a regulatory element of the Vegfr1 gene comprising a polynucleotide sequence that has at least 60% sequence identity with at least one of SEQ ID NO: 10 and SEQ ID NO: 30; and
[0051] a regulatory element of the SOX1 gene comprising a polynucleotide sequence that has at least 60% sequence identity with at least one of SEQ ID NO: 101 and SEQ ID NO: 103.

[0052] In a preferred embodiment, invention relates for a combination of at least seven transgenic non-human mammals comprising at least one cell comprising a reporter sequence operatively linked to a different regulatory element, wherein the regulatory elements comprise the regulatory element of OCT4 as herein described, the regulatory element of BMP4 as herein described the regulatory element of MYH6 as herein described, the regulatory element of FOXA2 as herein described, the regulatory element of AFP as herein described the regulatory element of SOX1 as herein described, the regulatory element of PAX6 as herein described.

[0053] In a fourth aspect, the invention provides for, the use of one or more types of reporter cells for the determination of an effect of an agent on mammalian embryonic development, wherein each type of reporter cell comprises a reporter sequence operatively linked to a different regulatory element of a gene, and wherein the different regulatory elements for each type of reporter cell is selected from the group consisting of:
[0054] a regulatory element of the OCT4 gene comprising a polynucleotide sequence that has at least 60% sequence identity with at least one of SEQ ID NO: 1 and SEQ ID NO: 21;
[0055] a regulatory element of the BMP4 gene, comprising a polynucleotide sequence that has at least 60% sequence identity at least one of SEQ ID NO: 2 and SEQ ID NO: 22;
[0056] a regulatory element of the MYH6 gene, comprising a polynucleotide sequence that has at least 60% sequence identity with at least one of SEQ ID NO: 3 and SEQ ID NO: 23;
[0057] a regulatory element of the PAX6 gene, comprising a polynucleotide sequence that has at least 60% sequence identity with at least one of SEQ ID NO: 4 and SEQ ID NO: 24;
[0058] a regulatory element of the FOXA2 gene, comprising a polynucleotide sequence that has at least 60% sequence identity with at least one of SEQ ID NO: 5 and SEQ ID NO: 25;
[0059] a regulatory element of the SOX17 gene, comprising a polynucleotide sequence that has at least 60% sequence identity with at least one of SEQ ID NO: 6 and SEQ ID NO: 26;
[0060] a regulatory element of the ALB gene, comprising a polynucleotide sequence that has at least 60% sequence identity with at least one of SEQ ID NO: 7 and SEQ ID NO: 27;
[0061] a regulatory element of the AFP gene, comprising a polynucleotide sequence that has at least 60% sequence identity with at least one of SEQ ID NO: 8 and SEQ ID NO: 28;
[0062] a regulatory element of the Ck18 gene comprising a polynucleotide sequence that has at least 60% sequence identity with at least one of SEQ ID NO: 9 and SEQ ID NO: 29;
[0063] a regulatory element of the Vegfr1 gene comprising a polynucleotide sequence that has at least 60% sequence identity with at least one of SEQ ID NO: 10 and SEQ ID NO: 30; and
[0064] a regulatory element of the SOX1 gene comprising a polynucleotide sequence that has at least 60% sequence identity with at least one of SEQ ID NO: 101 and SEQ ID NO: 103.

[0065] In a preferred embodiment, the invention provides for a use as described herein, comprising at least seven types of reporter cells, wherein the at least seven reporter cells are a reporter cell comprising the regulatory element of OCT4 as herein described, a reporter cell comprising the regulatory element of BMP4 as herein described, a reporter cell comprising the regulatory element of MYH6 as herein described, a reporter cell comprising the regulatory element of FOXA2 as herein described, a reporter cell comprising the regulatory element of AFP as herein described, a reporter cell comprising the regulatory element of SOX1 as herein described, a reporter cell comprising the regulatory element of PAX6 as herein described.

[0066] In a fifth aspect, the invention provides for the reporter cells as defined herein. In one embodiment, the invention provides for a collection of reporter cells as defined herein.

### DETAILED DESCRIPTION OF THE INVENTION

[0067] The inventors have identified a panel of biomarker genes that are transcriptionally activated or deactivated during different phases of early stem cell differentiation and embryonic tissue development. Based on these identified genes, the inventors have generated a panel human induced pluripotent stem cells (hiPSC) and mouse embryonic stem cells (mES) reporter cell lines. These reporter cells include a reporter sequence operatively linked to a regulatory element of one of the selected genes thereby allowing the visualization and quantitative assessment of disturbance of the specific signaling pathways during different stages of embryonic differentiation. This system provides the possibility to detect various cell type-specific teratogenic properties in a differentiating multicellular culture thereby substantially improving the classification of substances for their hazard in early human embryonic development. Furthermore, because the reporter sequence is included in every cell of the cell line, the read-out of the assay can be quantified at the single cell level, resulting in increased sensitivity and specificity.

[0068] Accordingly, in a first aspect, the invention provides an in vitro method of determining an effect of an agent on mammalian embryonic development. The method comprising:
[0069] a) providing one or more types of reporter cells, wherein each type of reporter cell comprises a reporter sequence operatively linked to a different regulatory element of a gene;
[0070] b) contacting the one or more type of reporter cells with the agent;
[0071] c) comparing the expression of the reporter sequences in the one or more types of reporter cells contacted with the agent to a corresponding cell not contacted with the agent; and,
[0072] d) determining that the agent has an effect on mammalian embryonic development if in step c) a difference in expression of the reporter sequences is detected between the reporter cells contacted with the agent and the corresponding cells not contacted with the agent for at least one type of reporter cell; and,
[0073] wherein the different regulatory elements for each type of reporter cell is selected from the group consisting of:
   [0074] a regulatory element of the OCT4 gene comprising a polynucleotide sequence that has at least 60% sequence identity with SEQ ID NO: 1 or SEQ ID NO: 21;
   [0075] a regulatory element of the BMP4 gene, comprising a polynucleotide sequence that has at least 60% sequence identity with SEQ ID NO: 2 or SEQ ID NO: 22;
   [0076] a regulatory element of the MYH6 gene, comprising a polynucleotide sequence that has at least 60% sequence identity with SEQ ID NO: 3 or SEQ ID NO: 23;
   [0077] a regulatory element of the PAX6 gene, comprising a polynucleotide sequence that has at least 60% sequence identity with SEQ ID NO: 4 or SEQ ID NO: 24;
   [0078] a regulatory element of the FOXA2 gene, comprising a polynucleotide sequence that has at least 60% sequence identity with SEQ ID NO: 5 or SEQ ID NO: 25;
   [0079] a regulatory element of the SOX17 gene, comprising a polynucleotide sequence that has at least 60% sequence identity with SEQ ID NO: 6 or SEQ ID NO: 26;
   [0080] a regulatory element of the ALB gene, comprising a polynucleotide sequence that has at least 60% sequence identity with SEQ ID NO: 7 or SEQ ID NO: 27;
   [0081] a regulatory element of the AFP gene, comprising a polynucleotide sequence that has at least 60% sequence identity with SEQ ID NO: 8 or SEQ ID NO: 28;
   [0082] a regulatory element of the Ck18 gene comprising a polynucleotide sequence that has at least 60% sequence identity with SEQ ID NO: 9 or SEQ ID NO: 29;
   [0083] a regulatory element of the Vegfr1 gene comprising a polynucleotide sequence that has at least 60% sequence identity with SEQ ID NO: 10 or SEQ ID NO: 30; and
   [0084] a regulatory element of the SOX1 gene comprising a polynucleotide sequence that has at least 60% sequence identity with at least one of SEQ ID NO: 101 and SEQ ID NO: 103.

[0085] As used herein, the term “operably linked” refers to a linkage of polynucleotide elements in a functional relationship. A nucleic acid is “operably linked” when it is placed into a functional relationship with another nucleic acid sequence. For instance, a transcription regulatory sequence is operably linked to a coding sequence if it affects the transcription of the coding sequence. Operably linked means that the DNA sequences being linked are typically contiguous and, where necessary to join two protein encoding regions, contiguous and in reading frame.

[0086] Methods of comparing the expression of the reporter sequences in the one or more types of reporter cells contacted with the agent to a corresponding cell not contacted with the agent (i.e. a control cell) are known to the person skilled in the art. Methods include but are not limited to fluorescence microscopy, high-content imaging, qPCR, RT-PCR, RNA sequencing, western blot, imaging flow cytometry and flow cytometry.

[0087] A difference in expression of the reporter sequences can be any kind of observed difference.

[0088] For example, the level of expression of the reporter sequence is an increase, a decrease, or no change in the level of expression of the reporter sequence as compared to the basal transcription level of the diagnostic nucleic acid or polypeptide. In one embodiment, the desired level of expression of reporter sequences is a decrease in the level of expression of the reporter sequence as compared to the basal transcription level of the reporter sequence.

[0089] In one embodiment, the reporter cell is a cell of a reporter cell line, a non-naturally occurring cell or a cultured cell.

[0090] As described above, the differentiation process from a fertilized oocyte into the primary embryonic germ layer cells (ectoderm, mesoderm and endoderm) and subsequently to the various embryonic tissues and organs, is a tightly timed and controlled process that is highly evolutionary conserved between species. The inventors have identified a number of genes that are highly representative for the differentiation processes at various stages of the embryonic development. Disturbance of the timely expression of these genes indicates disruption of proper embryonic development. The reporter cells lines as described herein can be deployed to determine disturbance of an abnormal pattern of expression of these genes that are linked to reporter sequence following exposure to an agent (as compared to a reporter cell that has not been exposed to the agent). Thus, by exposing one or more of the types of reporter cells as described herein to an agent, it is possible to categorize that agent as having a teratogenic effect. Accordingly, the present invention provides for a method of predicting teratogenicity of an agent.

[0091] OCT4 (octamer-binding transcription factor 4, POU5F1) is a transcription factor expressed in the pregastrulation embryo, early cleavage stage embryo, cells of the inner cell mass of the blastocyst, and in embryonic carcinoma (EC) cells. During normal development, OCT4 is down-regulated when cells are induced to differentiate in vitro and in the adult OCT4 is only found in germ cells. Disturbances in OCT4 expression can thus indicate that an agent thus has an effect on the early stages of embryonic development. During in vitro differentiation of hiPSC, OCT4 expression decreases overtime (FIG. 1A).

[0092] Preferably, the regulatory element of the OCT4 gene comprises or consists of a polynucleotide sequence that has at least 65, 70, 75, 80, 85, 90, 95, 96, 97, 98, 99 or 100% sequence identity with at least one of SEQ ID NO: 1 and SEQ ID NO: 21, of which SEQ ID NO: 1 is more preferred. More preferably, the regulatory element of the OCT4 gene comprises or consists of a polynucleotide sequence that has at least 65, 70, 75, 80, 85, 90, 95, 96, 97, 98, 99 or 100% sequence identity with at least one of SEQ ID NO: 11 and SEQ ID NO: 31 of which SEQ ID NO: 11 is more preferred.

[0093] BMP4 (Bone morphogenetic protein 4) is a transcription factor expressed during the middle stages of embryonic development and is essential during embryogenesis, most prominently for mesoderm formation and cardiac development. BMP4 has further been described to be involved in inducing cartilage and bone formation, tooth development, limb formation and fracture repair. In vitro during differentiation, BMP4 expression steadily increases and peaks around day 7, after which BMP4 expression slowly declines (see FIG. 1A). Disturbances in BMP4 expression can thus indicate that an agent thus has an effect on the middle stages of embryonic development.

[0094] Preferably, the regulatory element of the BMP4 gene comprises or consists of a polynucleotide sequence that has at least 65, 70, 75, 80, 85, 90, 95, 96, 97, 98, 99 or 100% sequence identity with at least one of SEQ ID NO: 2 and SEQ ID NO: 22, of which SEQ ID NO: 2 is more preferred. More preferably, the regulatory element of the BMP4 gene comprises or consists of a polynucleotide sequence that has at least 65, 70, 75, 80, 85, 90, 95, 96, 97, 98, 99 or 100% sequence identity with at least one of SEQ ID NO: 12 and SEQ ID NO: 32, of which SEQ ID NO: 12 is more preferred.

[0095] MYH6 (Myosin heavy chain, a isoform) is a motor protein that plays a role in muscle contraction and is expressed in mature cardiomyocytes. During embryonic differentiation, MYH6 expression increases over time, and peaks towards the end of the process (see FIG. 1A). Disturbances in MYH6 expression can thus indicate that an agent thus has an effect on the late stages of embryonic development.

[0096] Preferably, the regulatory element of the MYH6 gene comprises or consists of a polynucleotide sequence that has at least 65, 70, 75, 80, 85, 90, 95, 96, 97, 98, 99 or 100% sequence identity with at least one of SEQ ID NO: 3 and SEQ ID NO: 23, of which SEQ ID NO: 3 is more preferred. More preferably, the regulatory element of the MYH6 gene comprises or consists of a polynucleotide sequence that has at least 65, 70, 75, 80, 85, 90, 95, 96, 97, 98, 99 or 100% sequence identity with at least one of SEQ ID NO: 13 and SEQ ID NO: 33, of which SEQ ID NO: 13 is more preferred.

[0097] PAX6 (Paired box protein) also plays a role in embryological development. The PAX6 gene, found on chromosome 2, can be seen expressed in multiple early structures such as the spinal cord, hindbrain, forebrain and eyes. Mutations of the PAX6 gene in mammalian species can produce a drastic effect on the phenotype of the organism. PAX6 is also expressed in neural rosettes. During differentiation, PAX6 expression increases over time, and peaks towards the end of the neural rosette formation process (see FIG. 1C). Disturbances in PAX6 expression can thus indicate that an agent thus has an effect on the middle stages of embryonic development.

[0098] Preferably, the regulatory element of the PAX6 gene comprises or consists of a polynucleotide sequence that has at least 65, 70, 75, 80, 85, 90, 95, 96, 97, 98, 99 or 100% sequence identity with at least one of SEQ ID NO: 4 and SEQ ID NO: 24, of which SEQ ID NO: 4 is more preferred. More preferably, the regulatory element of the PAX6 gene comprises or consists of a polynucleotide sequence that has at least 65, 70, 75, 80, 85, 90, 95, 96, 97, 98, 99 or 100% sequence identity with at least one of SEQ ID NO: 14 and SEQ ID NO: 34, of which SEQ ID NO: 14 is more preferred.

[0099] SOX1 is a gene that encodes a transcription factor with a high mobility group DNA binding domain. SOX1 is one of the earliest transcription factors to be expressed in ectodermal cells committed to the neural fate: the onset of expression of SOX1 appears to coincide with the induction of neural ectoderm. During differentiation, SOX1 expression steadily increases and peaks around day 7, after which SOX1 expression slowly declines (see FIG. 1C). Disturbances in PAX6 expression can thus indicate that an agent thus has an effect on the middle stages of embryonic development.

[0100] Preferably, the regulatory element of the SOX1 gene comprises or consists of a polynucleotide sequence that has at least 65, 70, 75, 80, 85, 90, 95, 96, 97, 98, 99 or 100% sequence identity with at least one of SEQ ID NO: 101 and SEQ ID NO: 103, of which SEQ ID NO: 101 is more preferred. More preferably, the regulatory element of the SOX1 gene comprises or consists of a polynucleotide sequence that has at least 65, 70, 75, 80, 85, 90, 95, 96, 97, 98, 99 or 100% sequence identity with at least one of SEQ ID NO: 102 and SEQ ID NO: 104, of which SEQ ID NO: 102 is more preferred.

[0101] FOXA2 (forkhead box protein A2) is required during embryonic development for notochord formation and is involved in the development of multiple endoderm-derived organ systems such as the liver, pancreas and lungs. During embryonic differentiation, FOXA2 expression steadily increases and peaks around day 7, after which FOXA2 expression slowly declines (see FIG. 1B). Disturbances in FOXA2 expression can thus indicate that an agent thus has an effect on the intermediate stages of embryonic development.

[0102] Preferably, the regulatory element of the FOXA2 gene comprises or consists of a polynucleotide sequence that has at least 65, 70, 75, 80, 85, 90, 95, 96, 97, 98, 99 or 100% sequence identity with at least one of SEQ ID NO: 5 and SEQ ID NO: 25, of which SEQ ID NO: 5 is more preferred. More preferably, the regulatory element of the FOXA2 gene comprises or consists of a polynucleotide sequence that has at least 65, 70, 75, 80, 85, 90, 95, 96, 97, 98, 99 or 100% sequence identity with at least one of SEQ ID NO: 15 and SEQ ID NO: 35, of which SEQ ID NO: 15 is more preferred.

[0103] SOX17 (SRY-box 17) plays a key role in embryonic development where it is required for normal development of the definitive gut endoderm and looping of the embryonic heart tube. Furthermore, SOX17 plays an important role in embryonic and postnatal vascular development, including development of arteries. During embryonic differentiation, SOX17 increases over time, expression steadily increases and peaks around day 7, after which SOX17 expression slowly declines (see FIG. 1B). Disturbances in SOX17 expression can thus indicate that an agent thus has an effect on the intermediate stages of embryonic development.

[0104] Preferably, the regulatory element of the SOX17 gene comprises or consists of a polynucleotide sequence that has at least 65, 70, 75, 80, 85, 90, 95, 96, 97, 98, 99 or 100% sequence identity with at least one of SEQ ID NO: 6 and SEQ ID NO: 26, of which SEQ ID NO: 6 is more preferred. More preferably, the regulatory element of the SOX17 gene comprises or consists of a polynucleotide sequence that has at least 65, 70, 75, 80, 85, 90, 95, 96, 97, 98, 99 or 100% sequence identity with at least one of SEQ ID NO: 16 and SEQ ID NO: 36, of which SEQ ID NO: 16 is more preferred.

[0105] ALB (Albumin) is the main protein in plasma and produced by hepatocytes in the liver. hiPSC cells differentiated towards mature hepatocytes in vitro also produce and secrete Albumin. Albumin production is used as a hepatic activity and hepatocyte maturity measure. During embryonic differentiation towards hepatocytes, ALB expression increases over time, and peaks towards the end of the process (see FIG. 1B). Disturbances in ALB expression can thus indicate that an agent thus has an effect on the late stages of embryonic development.

[0106] Preferably, the regulatory element of the ALB gene comprises or consists of a polynucleotide sequence that has at least 65, 70, 75, 80, 85, 90, 95, 96, 97, 98, 99 or 100% sequence identity with at least one of SEQ ID NO: 7 and SEQ ID NO: 27, of which SEQ ID NO: 7 is more preferred. More preferably, the regulatory element of the ALB gene comprises or consists of a polynucleotide sequence that has at least 65, 70, 75, 80, 85, 90, 95, 96, 97, 98, 99 or 100% sequence identity with at least one of SEQ ID NO: 17 and SEQ ID NO: 37, of which SEQ ID NO: 17 is more preferred.

[0107] AFP (α-fetoprotein) is the fetal analog of albumin, also produced in hepatocytes and a major component of plasma during early embryonic development up to birth. After birth, levels of AFP decrease while levels of albumin increase. Hepatocytes differentiated in vitro from hiPSC can express both AFP and ALB towards the end of differentiation (Hannan et al, 2013). During embryonic differentiation towards hepatocytes, AFP expression increases over time, and peaks towards the end of the process (see FIG. 1B). Disturbances in AFP expression can thus indicate that an agent thus has an effect on the late stages of embryonic development

[0108] Preferably, the regulatory element of the AFP gene comprises or consists of a polynucleotide sequence that has at least 65, 70, 75, 80, 85, 90, 95, 96, 97, 98, 99 or 100% sequence identity with at least one of SEQ ID NO: 8 and SEQ ID NO: 28, of which SEQ ID NO: 8 is more preferred. More preferably, the regulatory element of the ALB gene comprises or consists of a polynucleotide sequence that has at least 65, 70, 75, 80, 85, 90, 95, 96, 97, 98, 99 or 100% sequence identity with at least one of SEQ ID NO: 18 and SEQ ID NO: 38, of which SEQ ID NO: 18 is more preferred.

[0109] Ck18 (cytokeratin 18) is a marker for mature hepatocytes. As differentiation proceeds, CK18 expression starts to emerge and peaks towards the end of the process (FIG. 7). Disturbances in Ck18 expression can thus indicate that an agent has an effect on the late stages of embryonic development

[0110] Preferably, the regulatory element of the Ck18 gene comprises or consists of a polynucleotide sequence that has at least 65, 70, 75, 80, 85, 90, 95, 96, 97, 98, 99 or 100% sequence identity with at least one of SEQ ID NO: 9 and SEQ ID NO: 29, of which SEQ ID NO: 29 is more preferred. More preferably, the regulatory element of the Ck18 gene comprises or consists of a polynucleotide sequence that has at least 65, 70, 75, 80, 85, 90, 95, 96, 97, 98, 99 or 100% sequence identity with at least one of SEQ ID NO: 19 and SEQ ID NO: 39, of which SEQ ID NO: 39 is more preferred.

[0111] Vegfr1 (Vascular endothelial growth factor receptor 1, FLT1) is a key player in the development of embryonic vasculature, the regulation of angiogenesis, cell survival, cell migration and macrophage function. As differentiation proceeds towards cardiomyocytes, Vegfr1 expression starts to emerge and peaks towards the end of the process (FIG. 6). Disturbances in Vegfr1 expression can thus indicate that an agent thus as an effect on the late stages of embryonic development

[0112] Preferably, the regulatory element of the Vegfr1 gene comprises or consists of a polynucleotide sequence that has at least 65, 70, 75, 80, 85, 90, 95, 96, 97, 98, 99 or 100% sequence identity with at least one of SEQ ID NO: 10 and SEQ ID NO: 30, of which SEQ ID NO: 30 is more preferred. More preferably, the regulatory element of the Vegfr1 gene comprises or consists of a polynucleotide sequence that has at least 65, 70, 75, 80, 85, 90, 95, 96, 97, 98, 99 or 100% sequence identity with at least one of SEQ ID NO: 20 and SEQ ID NO: 40, of which SEQ ID NO: 40 is more preferred.

[0113] In one embodiment of the invention, at least two reporter cell lines are contacted with the agent. Preferably, at least 3, 4, 5, 6, 7, 8, or 9 type of reporter cells lines are contacted with the agent. Preferably, when one or more reporter cell lines are contacted with the agent, the reporter cells line are contacted simultaneously with the agent.

[0114] In one embodiment of the invention, the type of reporter cell that is contacted with the agent in step b) comprises a regulatory element of the OCT4 gene as defined herein and one or more types of reporter cells each having a different regulatory element selected from the group consisting of:
[0115] a regulatory element of the BMP4 gene as defined herein;
[0116] a regulatory element of the MYH6 gene as defined herein;
[0117] a regulatory element of the PAX6 gene as defined herein;
[0118] a regulatory element of the FOXA2 gene as defined herein;
[0119] a regulatory element of the SOX17 gene as defined herein;
[0120] a regulatory element of the ALB gene as defined herein;
[0121] a regulatory element of the AFP gene as defined herein;
[0122] a regulatory element of the Ck18 gene as defined herein;
[0123] a regulatory element of the Vegfr1 gene as defined herein; and
[0124] a regulator element of the SOX1 gene as defined herein,

[0125] In one embodiment of the invention, the agent in step b) is contacted with a reporter cell comprising a regulatory element of the OCT4 gene as defined herein, a reporter cell comprising a regulatory element of the SOX1 gene as defined herein and with a reporter cell comprising a regulatory element of the PAX6 gene as defined herein. A combination of the OCT4, SOX1 and PAX6 reporter cells is used to follow hiPSC differentiation towards neural rosettes, where OCT4 expression can be used to monitor the loss of pluripotency, SOX1 marks the intermediate stage of development and PAX6 is used to follow the maturation of the neural rosettes.

[0126] In one embodiment of the invention, the agent in step b) is contacted with a reporter cell comprising a regulatory element of the OCT4 gene as defined herein, a reporter cell comprising a regulatory element of the BMP4 gene as defined herein, and a reporter cell comprising regulatory element of the MYH6 gene as defined herein. A combination of the OCT4, BMP4 and MYH6 can be used to follow hiPSC differentiating towards cardiomyocytes, where OCT4 expression can be used to monitor the loss of pluripotency, BMP4 marks the intermediate stage of development and MYH6 is used to follow the maturation of the cardiomyocytes.

[0127] In one embodiment of the invention, the agent in step b) is contacted with a reporter cell comprising a regulatory element of the OCT4 gene as defined herein, a reporter cell comprising a regulatory element of the FOXA2 gene as defined herein, a reporter cell comprising a regulatory element of the SOX17 gene as defined herein, and at least one of a reporter cell type comprising a regulatory element of the ALB gene as defined herein or a reporter cell type comprising a regulatory element of the AFP gene as defined herein. A combination of the OCT4, SOX17, FOXA2, and AFP or ALB can be used to follow hiPSC differentiating towards hepatocytes, where OCT4 expression can be used to monitor the loss of pluripotency, SOX17 and FOXA2 mark the intermediate stage of development and AFP or ALB is used to follow the maturation of the hepatocytes.

[0128] In preferred embodiments, present invention combines the differentiation of stem cells into the three embryonic cell lineages endoderm, mesoderm and ectoderm and subsequently into different functional tissues, in vitro mimicking the complex in vivo developmental processes. This integrated method, which preferably combines at least the seven biomarkers OCT4, FOXA2, BMP4, SOX1, AFP, MYH6 and PAX6, makes is possible to accurately identify chemicals that interfere with normal embryonic development, providing a comprehensive battery approach. Validation of the method confirms that integration of these seven biomarkers for endoderm, mesoderm and ectoderm and mature liver, heart, and neural cells is required to accurately identify chemicals that are classified as teratogenic in humans. FIG. 9 summarizes the correlation of the in vivo classification of five well-established teratogenic and one non-teratogenic compounds with their respective in vitro prediction based on the method as described herein that utilizes the at least the seven biomarkers OCT4, FOXA2, BMP4, SOX1, AFP, MYH6 and PAX. This method allows the evaluation of the specific biomarker expression targeting liver, heart and neural tissues, both in early and late stages of lineage differentiation. Expression of the biomarker OCT4 is decreased upon differentiation of the pluripotent stem cells, while early developmental markers FOXA2, BMP4 and SOX1 are expressed during establishment of endoderm, mesoderm and ectoderm, respectively. Upon further maturation of the liver, heart and neural tissues, expression of the early lineage biomarkers is reduced and activation of the liver-specific biomarker AFP, cardiomyocyte biomarker MYH6 and neural biomarker PAX6 is observed. Alterations in the expression pattern of one or more of these seven biomarkers after chemical exposure indicate perturbation of stem cell differentiation and early embryonic development, indicating the teratogenic properties of the tested agent. FIG. 9 table illustrates the importance of combining the seven biomarkers to make it possible to assay the main primary cell lineages: endo-, meso- and ectoderm, and proves the power of the methods predictability, which is precisely correlated with the in vivo classification of the respective compounds.

[0129] Accordingly, in one preferred embodiment of the invention, at least seven reporter cell types are contacted with the agent in step b) each of the at least seven reporter cell lines comprising a different regulatory element selected from:
[0130] a regulatory element of the OCT4 gene as defined herein.
[0131] a regulatory element of the BMP4 gene as defined herein;
[0132] a regulatory element of the MYH6 gene as defined herein; and
[0133] a regulatory element of the PAX6 gene as defined herein;

[0134] and at least one of:
[0135] a regulatory element of the FOXA2 gene as defined herein;
[0136] a regulatory element of the AFP gene as defined herein; or
[0137] a regulatory element of the SOX1 gene as defined herein.

[0138] In one embodiment, the reporter sequence according to the invention is a gene encoding a protein. Preferably, a reporter sequence encodes a protein that is readily detectable either by its presence, its association with a detectable moiety or by its activity that results in the generation of a detectable signal. In certain aspects, a detectable moiety may include a radionuclide, a fluorophore, a luminophore, a microparticle, a microsphere, an enzyme, an enzyme substrate, a polypeptide, a polynucleotide, a nanoparticle, and/or a nanosphere, all of which may be coupled to an antibody or a ligand that recognizes and/or interacts with a reporter. Generally, although not necessarily, the reporter sequence includes a nucleic acid sequence and/or encodes a detectable polypeptide that are not otherwise produced by the cells. Many reporter genes have been described and are available from a variety of sources including commercial sources such as, e.g., BioVision, EMD Millipore, Invitrogen, amongst other sources. Signals that may be detected include, but are not limited to color, fluorescence, luminescence, isotopic or radio-isotopic signals, cell surface tags, cell viability, relief of a cell nutritional requirement, cell growth and drug resistance. Reporter sequences include, but are not limited to, DNA sequences encoding .beta.-lactamase, .beta.-galactosidase (LacZ), alkaline phosphatase, thymidine kinase, green fluorescent protein (GFP), chloramphenicol acetyltransferase (CAT), luciferase, membrane bound proteins including, for example, G-protein coupled receptors (GPCRs), somatostatin receptors, CD2, CD4, CD8, the influenza hemagglutinin protein, symporters (such as NIS) and others well known in the art, to which high affinity antibodies or ligands directed thereto exist or can be produced by conventional means,

[0139] In one embodiment, a reporter sequence encodes a fluorescent protein. Examples of fluorescent proteins which may be used in accord with the invention include green fluorescent protein (GFP), enhanced green fluorescent protein (EGFP), Renilla Reniformis green fluorescent protein, GFPmut2, GFPuv4, enhanced yellow fluorescent protein (EYFP), enhanced cyan fluorescent protein (ECFP), enhanced blue fluorescent protein (EBFP), citrine, mCherry and red fluorescent protein from discosoma (dsRED). It is to be understood that these examples of fluorescent proteins are not exclusive and may encompass later developed fluorescent proteins, such as any fluorescent protein within the infrared, visible or ultraviolet spectra. Even more preferably, the fluorescent protein is green fluorescent protein (GFP), mCherry. DsRed or derivatives thereof. Most preferably, the fluorescent protein is SEQ ID NO: 41 or SEQ ID NO: 100.

[0140] In one embodiment of the invention, the reporter cell comprises a regulatory element of the OCT4 gene as described herein and a reporter sequence that comprises or consists of SEQ ID NO: 100.

[0141] In one embodiment of the invention, the reporter cell comprises a regulatory element of the BMP4 gene as described herein and a reporter sequence that comprises or consists of SEQ ID NO: 41.

[0142] In one embodiment of the invention, the reporter cell comprises a regulatory element of the MYH6 gene as described herein and a reporter sequence that comprises or consists of SEQ ID NO: 41.

[0143] In one embodiment of the invention, the reporter cell comprises a regulatory element of the PAX6 gene as described herein and a reporter sequence that comprises or consists of SEQ ID NO: 41.

[0144] In one embodiment of the invention, the reporter cell comprises a regulatory element of the FOX2A gene as described herein and a reporter sequence that comprises or consists of SEQ ID NO:41.

[0145] In one embodiment of the invention, the reporter cell comprises a regulatory element of the SOX17 gene as described herein and a reporter sequence that comprises or consists of SEQ ID NO:41.

[0146] In one embodiment of the invention, the reporter cell comprises a regulatory element of the ALB gene as described herein and a reporter sequence that comprises or consists of SEQ ID NO:41.

[0147] In one embodiment of the invention, the reporter cell comprises a regulatory element of the AFP gene as described herein and a reporter sequence that comprises or consists of SEQ ID NO:41.

[0148] In one embodiment of the invention, the reporter cell comprises a regulatory element of the Ck18 gene as described herein and a reporter sequence that comprises or consists of SEQ ID NO:41.

[0149] In one embodiment of the invention, the reporter cell comprises a regulatory element of the Vegfr1 gene as described herein and a reporter sequence that comprises or consists of SEQ ID NO:41.

[0150] In one embodiment of the invention, the reporter cell comprises a regulatory element of the SOX1 gene as described herein and a reporter sequence that comprises or consists of SEQ ID NO:41.

[0151] In another preferred embodiment, the reporter sequence is selected from the group consisting of horse radish peroxidise (HRP), luciferase, chloramphenicol acetyl transferase (CAT) and β-galactosidase.

[0152] The agent can be any type of compound of composition comprising a compound. For example, the agent can be a pharmaceutical agent, a chemical agent, an agrochemical agent, a cosmetic, a plasticizer, a dye or a food-ingredient. In one embodiment, the agent is an agent with suspected teratogenic toxicity.

[0153] In one embodiment, the agent is a polypeptide, a peptide, a nucleic acid, a (small) molecule, or a natural product.

[0154] In a second aspect, the invention provides for a kit of parts comprising:
[0155] one or more types of reporter cell, wherein each type of reporter cell comprises a reporter sequence operatively linked to a regulatory element of a gene and wherein the one or more type of reporter cells each comprise a different regulatory element selected from:
[0156] a regulatory element of the OCT4 gene as defined herein;
[0157] a regulatory element of the BMP4 gene as defined herein;
[0158] a regulatory element of the MYH6 gene as defined herein;
[0159] a regulatory element of the PAX6 gene as defined herein;
[0160] a regulatory element of the FOXA2 gene as defined herein;
[0161] a regulatory element of the SOX17 gene as defined herein;
[0162] a regulatory element of the ALB gene as defined herein;
[0163] a regulatory element of the AFP gene as defined herein;
[0164] a regulatory element of the Ck18 gene as defined herein;
[0165] a regulatory element of the Vegfr1 gene as defined herein; and
[0166] a regulatory element of the SOX1 gene as defined herein.

[0167] In one embodiment, the kit of parts comprises at least 2, 3, 4, 5, 6, 7, 8 or 9 types of reporter cells.

[0168] In one embodiment the kit of parts comprises a reporter cell comprising a regulatory element of the OCT4 gene as defined herein, a reporter cell comprising a regulatory element of the SOX1 gene as defined herein and a reporter cell comprising a regulatory element of the PAX6 gene as defined herein.

[0169] In one embodiment the kit of parts comprises a reporter cell comprising a regulatory element of the OCT4 gene as defined herein, a reporter cell comprising a regulatory element of the BMP4 gene as defined herein, and a reporter cell comprising a regulatory element of the MYH6 gene as defined herein.

[0170] In one embodiment the kit of parts comprises a reporter cell comprising a regulatory element of the OCT4 gene as defined herein, a reporter cell comprising a regulatory element of the FOXA2 gene as defined herein, a reporter cell comprising a regulatory element of the SOX17 gene as defined herein and at least one of a reporter cell type comprising a regulatory element of the ALB gene as defined herein or a reporter cell type comprising a regulatory element of the AFP gene as defined herein.

[0171] In a preferred embodiment, the kit of parts consists of a reporter cell comprising a regulatory element of the OCT4 gene as defined herein, a reporter cell comprising a regulatory element of the BMP4 gene as defined herein, a reporter cell comprising a regulatory element of the MYH6 gene as defined herein, a reporter cell comprising a regulatory element of the FOXA2 gene as defined herein, a reporter cell comprising a regulatory element of the AFP gene as defined herein, a reporter cell comprising a regulatory element of the PAX6 gene as defined herein, a reporter cell comprising a regulatory element of the SOX1 gene as defined herein.

[0172] In a third aspect, the invention provides for a combination of at least two transgenic non-human mammals comprising at least one cell comprising a reporter sequence operatively linked to a different regulatory element and wherein the regulatory element is selected from:
[0173] a regulatory element of the OCT4 gene as defined herein;
[0174] a regulatory element of the BMP4 gene as defined herein;
[0175] a regulatory element of the MYH6 gene as defined herein;
[0176] a regulatory element of the PAX6 gene as defined herein;
[0177] a regulatory element of the FOXA2 gene as defined herein;
[0178] a regulatory element of the SOX17 gene as defined herein;
[0179] a regulatory element of the ALB gene as defined herein;
[0180] a regulatory element of the AFP gene as defined herein;
[0181] a regulatory element of the Ck18 gene as defined herein;
[0182] a regulatory element of the Vegfr1 gene as defined herein; and
[0183] a regulatory element of the SOX1 gene as described herein.

[0184] Preferably, the transgenic non-human animals are rodents such as mice, rats, guinea pigs, hamsters and gerbils. The transgenic non-human animal that is most preferred is mice.

[0185] In one embodiment of the invention, the combination or non-human transgenic animals comprises at least 3, preferably at least, 4, 5, 6, 7 8, or 9 transgenic non-human mammals.

[0186] In one preferred embodiment, the invention provides for a combination of at least seven transgenic non-human mammals comprising at least one cell comprising a reporter sequence operatively linked to a different regulatory element, wherein the at least at least seven transgenic non-human mammals comprise a cell comprising a regulatory element of the OCT4 gene as defined herein, a regulatory element of the BMP4 gene as defined herein, a regulatory element of the MYH6 gene as defined herein, a regulatory element of the PAX6 gene as defined herein, a regulatory element of the FOXA2 gene as defined herein, a regulatory element of the AFP gene as defined herein and a regulatory element of the SOX1 gene as described herein.

[0187] In a forth aspect the invention provides for a use of one or more types of reporter cells for the determination of an effect of an agent on mammalian embryonic development,

[0188] wherein each type of reporter cell comprises a reporter sequence operatively linked to a different regulatory element of a gene,

[0189] and wherein the different regulatory elements for each type of reporter cell is selected from the group consisting of:
[0190] a regulatory element of the OCT4 gene as defined herein;
[0191] a regulatory element of the BMP4 gene as defined herein;
[0192] a regulatory element of the MYH6 gene as defined herein;
[0193] a regulatory element of the PAX6 gene as defined herein;
[0194] a regulatory element of the FOXA2 gene as defined herein;
[0195] a regulatory element of the SOX17 gene as defined herein;
[0196] a regulatory element of the ALB gene as defined herein;
[0197] a regulatory element of the AFP gene as defined herein;
[0198] a regulatory element of the Ck18 gene as defined herein;
[0199] a regulatory element of the Vegfr1 gene as defined herein; and
[0200] a regulatory element of the SOX1 gene as described herein.

[0201] In a fifth aspect, the invention provides for a reporter cell as defined herein. In one embodiment, the invention provides for a collection of reporter cells as defined herein. In one embodiment, the collection of reporter cells comprises at least two reporter cells, at least 3, 4, 5, 6, 7, 8 or 9 reporter cells. In one preferred embodiment, the collection of reporter cells comprises at least seven reporter cells comprising a reporter cell comprising the regulatory element of OCT4 as herein described, a reporter cell comprising the regulatory element of BMP4 as herein described, a reporter cell comprising the regulatory element of MYH6 as herein described, a reporter cell comprising the regulatory element of FOXA2 as herein described, a reporter cell comprising the regulatory element of AFP as herein described, a reporter cell comprising the regulatory element of SOX1 as herein described, a reporter cell comprising the regulatory element of PAX6 as herein described,

### Definitions

[0202] In this document and in its claims, the verb “to comprise” and its conjugations is used in its non-limiting sense to mean that items following the word are included, but items not specifically mentioned are not excluded. In addition, reference to an element by the indefinite article “a” or “an” does not exclude the possibility that more than one of the elements is present, unless the context clearly requires that there be one and only one of the elements. The indefinite article “a” or “an” thus usually means “at least one”.

[0203] The terms “homology”, “sequence identity” and the like are used interchangeably herein. Sequence identity is herein defined as a relationship between two or more amino acid (polypeptide or protein) sequences or two or more nucleic acid (polynucleotide) sequences, as determined by comparing the sequences. In the art, “identity” also means the degree of sequence relatedness between amino acid or nucleic acid sequences, as the case may be, as determined by the match between strings of such sequences. “Similarity” between two amino acid sequences is determined by comparing the amino acid sequence and its conserved amino acid substitutes of one polypeptide to the sequence of a second polypeptide. “Identity” and “similarity” can be readily calculated by known methods.

[0204] “Sequence identity” and “sequence similarity” can be determined by alignment of two peptide or two nucleotide sequences using global or local alignment algorithms, depending on the length of the two sequences. Sequences of similar lengths are preferably aligned using global alignment algorithms (e.g. Needleman Wunsch) which align the sequences optimally over the entire length, while sequences of substantially different lengths are preferably aligned using a local alignment algorithm (e.g. Smith Waterman). Sequences may then be referred to as “substantially identical” or “essentially similar” when they (when optimally aligned by for example the programs GAP or BESTFIT using default parameters) share at least a certain minimal percentage of sequence identity (as defined below). GAP uses the Needleman and Wunsch global alignment algorithm to align two sequences over their entire length (full length), maximizing the number of matches and minimizing the number of gaps. A global alignment is suitably used to determine sequence identity when the two sequences have similar lengths. Generally, the GAP default parameters are used, with a gap creation penalty=50 (nucleotides)/8 (proteins) and gap extension penalty=3 (nucleotides)/2 (proteins). For nucleotides the default scoring matrix used is nwsgapdna and for proteins the default scoring matrix is Blosum62 (Henikoff & Henikoff, 1992, PNAS 89, 915-919). Sequence alignments and scores for percentage sequence identity may be determined using computer programs, such as the GCG Wisconsin Package, Version 10.3, available from Accelrys Inc., 9685 Scranton Road, San Diego, Calif. 92121-3752 USA, or using open source software, such as the program “needle” (using the global Needleman Wunsch algorithm) or “water” (using the local Smith Waterman algorithm) in EmbossWIN version 2.10.0, using the same parameters as for GAP above, or using the default settings (both for ‘needle’ and for ‘water’ and both for protein and for DNA alignments, the default Gap opening penalty is 10.0 and the default gap extension penalty is 0.5; default scoring matrices are Blossum62 for proteins and DNAFull for DNA). When sequences have a substantially different overall lengths, local alignments, such as those using the Smith Waterman algorithm, are preferred.

[0205] Alternatively, percentage similarity or identity may be determined by searching against public databases, using algorithms such as FASTA, BLAST, etc. Thus, the nucleic acid and protein sequences of the present invention can further be used as a “query sequence” to perform a search against public databases to, for example, identify other family members or related sequences. Such searches can be performed using the BLASTn and BLASTx programs (version 2.0) of Altschul, et al. (1990) J. Mol. Biol. 215:403-10. BLAST nucleotide searches can be performed with the NBLAST program, score=100, wordlength=12 to obtain nucleotide sequences homologous to oxidoreductase nucleic acid molecules of the invention. BLAST protein searches can be performed with the BLASTx program, score=50, wordlength=3 to obtain amino acid sequences homologous to protein molecules of the invention. To obtain gapped alignments for comparison purposes, Gapped BLAST can be utilized as described in Altschul et al., (1997) Nucleic Acids Res. 25(17): 3389-3402. When utilizing BLAST and Gapped BLAST programs, the default parameters of the respective programs (e.g., BLASTx and BLASTn) can be used. See the homepage of the National Center for Biotechnology Information at http://www.ncbi.nlm.hih.gov/.

[0206] As used herein, the term “promoter” or “transcription regulatory sequence” refers to a nucleic acid fragment that functions to control the transcription of one or more coding sequences, and is located upstream with respect to the direction of transcription of the transcription initiation site of the coding sequence, and is structurally identified by the presence of a binding site for DNA-dependent RNA polymerase, transcription initiation sites and any other DNA sequences, including, but not limited to transcription factor binding sites, repressor and activator protein binding sites, and any other sequences of nucleotides known to one of skill in the art to act directly or indirectly to regulate the amount of transcription from the promoter. A “constitutive” promoter is a promoter that is active in most tissues under most physiological and developmental conditions. An “inducible” promoter is a promoter that is physiologically or developmentally regulated, e.g. by the application of a chemical inducer.

[0207] Any reference to nucleotide or amino acid sequences accessible in public sequence databases herein refers to the version of the sequence entry as available on the filing date of this document.

[0208] All patent and literature references cited in the present specification are hereby incorporated by reference in their entirety.

### DESCRIPTION OF THE FIGURES

[0209] FIG. 1: hiPSC cells were differentiated towards cardiomyocytes, hepatocyte and neural rosettes by addition of specific growth factors at specific times during differentiation (as described herein). RNA samples were collected at Day 0, Day 7 and Day 10, 14 or 21 and biomarker expression was analyzed using qPCR.

[0210] A) Cardiomyocyte differentiation. OCT4 was expressed in pluripotent stem cells and during differentiation the expression decreased. BMP4 marked the middle stage of the differentiation and expression peaks around day 7. MYH6 was expressed in mature cardiomyocytes and expression increased overtime.

[0211] B) Hepatocyte differentiation. OCT4 was expressed in pluripotent stem cells and during differentiation the expression decreased. SOX17 and FOXA2 were expressed around day 7 which marks the intermediate stage of differentiation. ALB and AFP were expressed during late stages of differentiation.

[0212] C) Neural rosette formation. OCT4 was expressed in pluripotent stem cells and during differentiation the expression decreases. SOX1 marked the middle stage of the differentiation and expression peaks around day 7. PAX6 is expressed in neural rosettes and expression increases over time.

[0213] FIG. 2: Differentiation in the presence of retinoic acid. To measure the effect of the teratogenic compound retinoic acid, hiPSC cells were differentiated towards hepatocytes (A), cardiomyocytes (B) and neural rosettes (C) in the presence of retinoic acid. During and at the end of differentiation, RNA samples were collected and biomarker expression was analyzed using qPCR. * p<0.05 in T-test compared to vehicle control.

[0214] FIG. 3: Differentiation in the presence of acrylamide. To measure the effect of the non-teratogenic compound acrylamide, hiPSC cells were differentiated towards hepatocytes (A) and cardiomyocytes (B) in the presence of acrylamide. During and at the end of differentiation, RNA samples were collected and biomarker expression was analyzed using qPCR. * p<0.05 in T-test compared to vehicle control (no changes were significant).

[0215] FIG. 4: OCT4-GFP reporter cell line. hiPSC were genetically modified to express OCT4-GFP from the endogenous locus. HiPSC express OCT4 in the pluripotent state (Day 0). (A) FACS plots show the GFP intensity of wild-type unmodified hiPSC and OCT4-GFP hiSPC cells. (B) percentage of GFP positive cells and GFP intensity of wild-type and OCT-GFP hiPSC (clone 1) during differentiation towards cardiomyocytes.

[0216] FIG. 5: Defective cardiomyocyte differentiation upon teratogenic compound exposure. mES cells were exposed to teratogenic compounds during mES cell differentiation towards cardiomyocytes. The percentage of beating 3D embryoid bodies (examples in A), representing functional cardiomyocytes, was counted. (B) Quantification of beating bodies. Presented values are expressed as percentages of control. Students t-test was used to determine significance. *p<0.05, **p<0.01, ***p<0.001.

[0217] FIG. 6: mES cells were differentiated towards cardiomyocytes or hepatocytes by the addition of specific growth factors at specific times during differentiation (as described herein). RNA samples were collected at Day 0, Day 5, Day 12 and Day 18 and biomarker expression was analyzed using qPCR.

[0218] A) Cardiomyocyte differentiation. OCT4 was expressed in pluripotent mES cells and expression decreased as differentiation progressed. BMP4 was expressed at the intermediate stage of differentiation and expression peaked around day 5. Vegfr1 marked maturing cardiomyocytes and expression peaked around day 12.

[0219] B) Hepatocyte differentiation. OCT4 was expressed in pluripotent mES cells and expression decreased as differentiation progressed. FOXA2 and SOX17 were expressed at the intermediate stage of differentiation and expression peaks around day 10.

[0220] FIG. 7: GFP-Ck18 reporter cells were differentiated towards hepatocytes. During differentiation, the expression of GFP-CK18, a marker for mature hepatocytes, increased overtime, which can be observed using microscopy (A). (B) Expression of GFP-CK18 was measured by quantifying the GFP expression. GFP-intensity calculated with Fiji image processing package.

[0221] FIG. 8: Defective hepatocyte differentiation upon teratogenic compound exposure. mES GFP-Ck18 reporter cells were exposed to different teratogenic compounds during mES cell differentiation towards hepatocytes. After 21 days, fluorescence intensity of the hepatocyte specific GFP-Ck18 reporter was measured using microscopy and quantified using Fiji image processing software. GFP intensity was normalized to nuclear intensity measured using DAPI. Presented values are expressed as percentages of control. Student t-test was used for determination of significance. *p<0.05 **p<0.01.*** p<0.001.

[0222] FIG. 9: Table summarizing the correlation of the in vivo classification of 5 well-established teratogenic and 1 non-teratogenic compounds with their respective in vitro prediction based method as described herein which utilizes seven different types of reporter cells as indicated in the table. Reduction (+) of the biomarker expression means disruption of the developmental processes, which flags the teratogenic potential of the respective compound under assessment. No effect on the biomarker expression (−) indicates the non-teratogenic compounds. Inconclusive results have been additionally highlighted (i).

### DESCRIPTION OF THE SEQUENCES

TABLE 1
Sequences

| SEQ ID NO: | Name |
|---|---|
| 1 | OCT4 promotor region (human) |
| 2 | BMP4 promotor region (human) |
| 3 | MYH6 promotor region (human) |
| 4 | PAX6 promotor region (human) |
| 5 | FOXA2 promotor region (human) |
| 6 | SOX17 promotor region (human) |
| 7 | ALB promotor region (human) |
| 8 | AFP promotor region (human) |
| 9 | Ck18 promotor region (human) |
| 10 | Vegfr1 promotor region (human) |
| 11 | OCT4 regulatory element (human) |
| 12 | BMP4 regulatory element (human) |
| 13 | MYH6 regulatory element (human) |
| 14 | PAX6 regulatory element (human) |
| 15 | FOXA2 regulatory element (human) |
| 16 | SOX17 regulatory element (human) |
| 17 | ALB regulatory element (human) |
| 18 | AFP regulatory element (human) |
| 19 | Ck18 regulatory element (human) |
| 20 | Vegfr1 regulatory element (human) |
| 21 | OCT4 promotor region (mouse) |
| 22 | BMP4 promotor region (mouse) |
| 23 | MYH6 promotor region (mouse) |
| 24 | PAX6 promotor region (mouse) |
| 25 | FOXA2 promotor region (mouse) |
| 26 | SOX17 promotor region (mouse) |
| 27 | ALB promotor region (mouse) |
| 28 | AFP promotor region (mouse) |
| 29 | Ck18 promotor region (mouse) |
| 30 | Vegfr1 promotor element (mouse) |
| 31 | OCT4 regulatory element (mouse) |
| 32 | BMP4 regulatory element (mouse) |
| 33 | MYH6 regulatory element (mouse) |
| 34 | PAX6 regulatory element (mouse) |
| 35 | FOXA2 regulatory element (mouse) |
| 36 | SOX17 regulatory element (mouse) |
| 37 | ALB regulatory element (mouse) |
| 38 | AFP regulatory element (mouse) |
| 39 | Ck18 regulatory element (mouse) |
| 40 | Vegfr1 regulatory element (mouse) |
| 41 | GFP with PGK-NEO selection (N-terminal) |
| 42 | hOCT4_BAC_GFP_FW |
| 43 | hOCT4_BAC_GFP_REV |
| 44 | hALB_BAC_GFP-N-F |
| 45 | hALB_BAC_GFP-N-R |
| 46 | hAFP_BAC_GFP-N_F |
| 47 | hAFP_BAC_GFP-N_R |
| 48 | hMYH6_BAC_GFP-N_F |
| 49 | hMYH6_BAC_GFP-N_R |
| 50 | mCK18_BAC_GFP_NF |
| 51 | mCK18_BAC_GFP_NR |
| 52 | hOCT4_homDonor_F |
| 53 | hOCT4_homDonor_R |
| 54 | hALB_Hom_N_FW |
| 55 | hALB_Hom_N_REV |
| 56 | hAFP_Hom_N_FW |
| 57 | hAFP_Hom_N_REV |
| 58 | hMYH6_Hom_N_FW |
| 59 | hMYH6_Hom_N_REV |
| 60 | hOct4-Crispr_F |
| 61 | hOct4-Crispr-R |
| 62 | ALB-Cripsr-N1 |
| 63 | ALB-Cripsr-N1 |
| 64 | AFP-Crispr-N1 |
| 65 | AFP-Crispr-N1 |
| 66 | MYH6-Crispr-N1 |
| 67 | MYH6-Crispr-N1 |
| 68 | hBMP4-FW2 |
| 69 | hBMP4-Rev2 |
| 70 | hSOX17-FW2 |
| 71 | hSOX17 Rev2 |
| 72 | hAFP-FW3 |
| 73 | hAFP-Rev3 |
| 74 | hALB-FW3 |
| 75 | hALB-Rev3 |
| 76 | GAPDH-human-F |
| 77 | GAPDH-human-R |
| 78 | Hprt-human-F |
| 79 | Hprt-human-R |
| 80 | MYH6-FW |
| 81 | MYH6-Rev |
| 82 | FoxA2-human-F |
| 83 | FoxA2-human-R |
| 84 | Oct-4-human-F |
| 85 | Oct4-human-R |
| 86 | Hprt-F |
| 87 | Hprt-R |
| 88 | GAPDH-F |
| 89 | GAPDH-R |
| 90 | Oct4 |
| 91 | Oct4 |
| 92 | BMP-4 |
| 93 | BMP-4 |
| 94 | SOX17 |
| 95 | SOX17 |
| 96 | FOXA2 |
| 97 | FOXA2 |
| 98 | VEGFR |
| 99 | VEGFR |
| 100 | GFP with PGK-NEO selection (C-terminal) |
| 101 | SOX1 promotor region (human) |
| 102 | SOX1 regulatory region (human) |
| 103 | SOX1 promotor region (mouse) |
| 104 | SOX1 regulatory region (mouse) |
| 105 | SOX1_FW |
| 106 | SOX1_Rev |

### EXAMPLES

[0224] Materials and Methods

[0225] HiPSC Cell Culture

[0226] Human Episomal iPSC Line (hiPSC) obtained from Thermo Scientific (A18945) were passaged as clumps using ReleasR and maintained in mTESR medium (StemCell Technologies) with 0.5% PS on Matrigel (Corning) according to established protocols.

[0227] mES Cell Culture

[0228] C57/Bl6 B4418 wild type mouse ES (mES) cells were cultured in ES knockout medium (Gibco) containing 10% FCS, 2 mM glutamax, 1 mM sodium pyruvate, 1% non-essential amino acids (NEAA), 1% pencillin/streptomycin (PS), 0.1 mM 2-mercaptoethanol and leukemia inhibitory factor (LIF) as previously described (Hendriks et al., 2016). Mouse ES cells were propagated on irradiated primary mouse embryonic fibroblasts as feeders according to established protocols.

### Example 1: Human iPSC Differentiation

[0229] For differentiation, single cell suspensions were created using Tryple select (Thermo) and single cell suspensions were counted using a flow cytometer before seeding.

[0230] Cardiomyocyte

[0231] The protocol for cardiomyocyte differentiation is based on (Den Hartogh et al., 2015, which is incorporated herein by reference). Briefly, on day −4, hiPSC cells were seeded in 24-well plates in mTESR medium on Matrigel. On day 0, the medium was replaced with BEL medium (IMDM, HF12 medium, PFHMII medium, BSA, ITS-X, CD lipids, α-Monothioglycerol, Glutamax, PS and ascorbic acid) containing BMP4, Activin A and Chir99021. At day 3 of differentiation, the medium was refreshed with BEL containing Xav939. On day 7 and 10 of differentiation, the medium was replaced with BEL without growth factors. RNA samples were collected on day 0, day 7 and day 14 of differentiation.

[0232] The results can be seen in FIG. 1A: OCT4, a marker of pluripotency was expressed at day 0 and, as expected, the expression decreased during differentiation. It was further found that BMP4 is a good marker for the middle stage of differentiation as the expression peaks around day 7, while MYH6 was found to be a good marker for mature cardiomyocytes, its expression increasing over time.

[0233] Hepatocyte

[0234] The hepatocyte differentiation protocol is based on (Chen et al., 2012, which is incorporated herein by reference). In brief, hiPSC cells were seeded on day −4 in mTESR medium on Matrigel. On day 0 the mTESR medium was replaced with RPMI medium containing B27, Activin A, Chir99021, HGF and PS. On day 3, the cells were refreshed with DMEM medium containing KO serum replacement, Glutamax, NEAA, 2-mercaptoethanol, DMSO and PS. On day 7, the medium was replaced with IMDM medium containing oncostatin M, dexamethasone, ITS, Glutamax, NEAA and PS. On day 10, 14 and 17, cells are refreshed with IMDM medium containing ITS, Glutamax, NEAA and PS. RNA samples were collected on day 0, day 7 and day 21 of differentiation.

[0235] The results can be seen in FIG. 1B: OCT4, a marker of pluripotency was expressed at day 0 and, as expected, the expression decreased during differentiation. SOX17 and FOXA2 were expressed around day 7 and can therefore be used to test whether differentiation is affected at the intermediate stage. ALB and AFP were expressed during late stages of differentiation and these markers were used to see whether differentiation is affected at the late stage.

[0236] Neural Rosette

[0237] The protocol for neural differentiation is based on (Lippmann, Estevez-Silva, & Ashton, 2014, which is incorporated herein by reference). In short, hiPSC were seeded in mTESR medium on Matrigel on day −1. On day 0, medium was replaced with E6 medium with PS to start differentiation. Medium was refreshed with E6 medium on Day 3 and 7. RNA samples were collected on day 0, day 7 and day 10.

[0238] The results can be seen in FIG. 1C: OCT4, a marker of pluripotency, is expressed at Day 0 and, as expected, the expression decreases during differentiation. SOX1 is expressed around day 7 and can therefore be used to test whether differentiation is affected at the intermediate stage. PAX6 is expressed in maturing neural rosettes and thus expression increased overtime.

### Example 2: Effect of Teratogenic Compounds on hiPSCs

[0239] Compound Exposure During Differentiation

[0240] To assess the effect of potential teratogenic agents, hiPSC were treated with the test material from day 0 until the end of differentiation. When differentiation medium was refreshed, fresh compound was added. The maximum concentration of the vehicle was 0.1% for DMSO and All-trans retinoic acid, acrylamide, 5-fluorouracil, diphenylhydantoin and thalidomide were dissolved in DMSO.

[0241] RNA Isolation, cDNA Synthesis and qPCR

[0242] Induction of the biomarker expression was compared with the expression of the gene in undifferentiated cells using quantitative real-time PCR (qRT-PCR). At several time points during differentiation, total RNA was isolated using Trizol (Qiagen). Complementary DNA was synthesized using oligo(dT) primers and SuperScript VI ReverseTranscriptase (Invitrogen) according to the manufacturer's protocol. Expression of biomarker genes was determined using specific primers (SEQ ID NOs: 68-99, 105 and 106) spanning the exon-exon boundaries of the genes with the PowerUP SYBR Green Master Mix (Applied Biosystems) on a Quantstudio 5 Real-Time PCR System (Applied Biosystems) using ROX as a passive reference. Relative expression was normalized using expression of the GAPDH and HPRT genes.

[0243] Results

[0244] To measure the effect of the teratogenic compound retinoic acid, hiPSC cells were differentiated towards hepatocytes, cardiomyocytes and neural rosettes in the presence of retinoic acid as described here above. Retinoic acid is a known teratogenic compound and as such, this allowed us to measure whether or our selected biomarkers would reflect the teratogenic nature of retinoic acid. Expression of AFP and ALB in hepatocytes, MYH6 in cardiomyocytes and PAX6 in neural rosettes was reduced when retinoic acid was added during differentiation (see FIG. 2).

[0245] In contrast, when hiPSC cells were differentiated to hepatocytes and cardiomyocytes in the presence of the non-teratogenic compound, acrylamide, no significant reduction of biomarker expression was observed during hepatocyte or cardiomyocyte differentiation (see FIG. 3).

### Example 3: OCT4-GFP Reporter Cell Line

[0246] Generation of GFP Reporter Cell Lines

[0247] The constructs for the GFP reporters were generated by BAC recombineering as described (Poser et al., 2008). Bacterial strains with a BAC containing the biomarker gene were selected using the mouse or human BAC finder and ordered from Thermo Scientific. The putative biomarker genes on the BAC were modified with a N-terminal or C-terminal GFP green fluorescent marker (Poser et al., 2008, supra) using BAC recombineering (SEQ ID NOs: 41,100). Electrocompetent BAC strains were first transformed with the pRed/ET plasmid that contains the RecE and RecT recombination enzymes. In the N-terminal GFP cassette, GFP consists of two exons, which are separated by the PGK promotor and neomycin selection cassette in the intron. The C-terminal GFP cassette consists of a GFP-tag linked to an IRES and a Neomycin/Kanamycin selection cassette. PCR fragments encoding the C-terminal or N-terminal GFP reporter cassette were generated using primers that each contain 50 nucleotide additional sequence homologous to the 5′ or 3′ sequence of the biomarker gene on the BAC (SEQ ID NOs: 42-51). These homologous sequences on both the 5′- and the 3′-ends of the PCR fragment allow Red/ET mediated site-specific recombination of the N-terminal or C-terminal GFP selection cassette at the 5′-end or 3′-end of the biomarker gene on the BAC. BAC strains that contain pRed/ET were grown at 37° C. for 45 min in the presence of L-arabinose to induce expression of the recombination enzymes. Subsequently, BAC strains were transformed with the GFP selection cassette PCR fragment by electroporation, incubated at 37° C. for 2 h to allow recombination of the PCR fragment with the BAC, and plated on kanamycin selection plates. Individual clones were analyzed for proper integration of the GFP cassette by PCR. Modified BACs were isolated using the Nucleobond PC100 DNA isolation kit (Macherey Nagel).

[0248] Creation of hiPSC Reporter Cell Lines

[0249] For hiPSC reporter cell lines, donor constructs were created from the BAC constructs containing the GFP selection cassette and homology arms matching the target sites within the reporter genes. PCR fragments were created using primers represented by SEQ ID NOs: 52-59. Furthermore, constructs containing Cas9 as well as a gRNA cutting near the START op STOP codon of the biomarker gene were created for gene targeting, as described in (Hsu et al., 2013), using the primers as represented by SEQ ID NOs:60-67.

[0250] hiPSC cells were seeded on Matrigel coated dishes 24 h prior to transfection. Donor constructs and gRNAs were transfected into hiPSC using lipofectamine 3000. Monoclonal hiPSC lines were selecting using neomycin and screened for integration of the construct by PCR.

[0251] Flow Cytometry

[0252] GPF reporter expression was generally determined by flow cytometry (Guava easyCyte 6HT, EMD Millipore). For this, differentiated cells were harvested as a single cell suspension using Tryple Select (Thermo) and resuspended in medium. Cell harvest was immediately followed by flow cytometry analysis.

[0253] Results

[0254] hiPSC were genetically modified to express OCT4-GFP from the endogenous locus and GFP expression was assed using flow cytometry. The cells were then differentiated as described above. At Day 0, OCT4 was highly expressed as expected in pluripotent cells (see FIG. 4A). During differentiation towards cardiomyocytes, both the average GFP intensity and the number of GFP positive cells reduced in the OCT4-GFP expressing clone (FIG. 4B). The OCT4-GFP cells were able to form beating cardiomyocytes, indicating that the gene targeting did not affect the differentiation potential of the hiPSC (results not shown).

### Example 4: Mouse ES Differentiation

[0255] Cardiomyocyte

[0256] For cardiomyocyte differentiation embryonic bodies were used, formed by hanging drops containing 750 cells in Iscoves's Modified Dulbecco's Medium (IMDM). Prior to hanging drop formation, cells were cultured on gelatine-coated dishes in IMDM supplemented with 20% FBS. Cells were detached with cell dissociation buffer (Gibco). After 3 days, embryonic bodies were transferred to a bacterial plate in differentiation medium (IMDM, 10% serum (unless specified otherwise), PS, NEAA and 2-mercapto ethanol). On day 5, the bodies were transferred to a 48-well plate in differentiation medium containing 2% serum, BMP, Activin A, Chir99021 and Xav939. On day 7 embryonic bodies were exposed to only Xav939 in differentiation medium and on day 11 all growth factors were removed and replaced with differentiation medium. Day 13 was used as endpoint for cardiomyocyte differentiation. On this day, beating bodies were quantified and RNA samples collected.

[0257] The results can be seen in FIG. 6A: OCT4, a marker of pluripotency was expressed at day 0 and, as expected, the expression decreased during differentiation. It was further found that BMP4 was a good marker for the middle stage of differentiation as the expression peaked around day 7, while Vegfr1 marked maturing cardiomyocytes and expression peaked around day 12. Exposure to the teratogenic agents 5′fluoracil, retinoic acid and diphenylhydantoin resulted in a decrease in beating cardiomyocytes after 13 days of differentiation, as can be seen in FIG. 5B.

[0258] Hepatocyte

[0259] Hepatocyte differentiation was started from a monolayer of mES cells on day −1. On day 0, differentiation medium supplemented with Activin A was added. On day 4, the medium was replaced with liver differentiation medium (DMEM containing 10% serum, PS, NEAA and 2-mercaptoethanol) with aFGF and sodium butyrate. On day 9, the medium was replaced with liver differentiation medium containing HGF. On day 14, cells were exposed to liver differentiation medium containing Dexamethasone and Oncostatin M. From day 17 onwards, liver differentiation medium was refreshed every 3-4 days. Endpoint of differentiation was set on day 21.

[0260] Proper differentiation of the mES cells was confirmed by a decrease in expression of the pluripotency marker gene OCT4, and expression of the FOXA2 and SOX17 genes during the intermediate stage of differentiation and expression peaks around day 10 (FIG. 6B).

### Example 5: mES Reporter Cell Lines

[0261] Creation of mES Reporter Cell Lines

[0262] mES cells were seeded on gelatin-coated culture dishes 24 h prior to transfection. Modified BACs were transfected into the mES cells using Lipofectamine 2000 (Invitrogen) as described previously (Poser et al., 2008, supra). Monoclonal mES cell lines were selected based on the level of induction of the GFP reporter after differentiation. GFP expression in differentiated cells was determined by flow cytometry.

[0263] Results

[0264] GFP-Ck18 mES reporter cells were created as described above; Ck18 is a known marker for mature hepatocytes. The reporter cells were differentiated towards hepatocytes as described above. During differentiation, the expression of GFP-Ck18 increased overtime (FIG. 7) indicating that the reporter cells behave like unmodified mES cells. To test the effect of teratogenic compounds on GFP-CK18 mES reporter cell line differentiation, the cells were exposed to the teratogenic compounds 5′Fluoracil and retinoic acid. After 21 days, fluorescence intensity of the hepatocyte specific CK-18-GFP reporter was measured and quantified (FIG. 8). GFP-Ck18 intensity was significantly reduced upon exposure to 5′Fluoracil and retinoic acid, indicating that the reporter cell line is a reliable way to measure teratogenic effects.

### REFERENCES

[0265] Chen, Y. F., Tseng, C. Y., Wang, H. W., Kuo, H. C., Yang, V. W., & Lee, O. K. (2012). Rapid generation of mature hepatocyte-like cells from human induced pluripotent stem cells by an efficient three-step protocol. Hepatology.
[0266] Den Hartogh, S. C., Schreurs, C., Monshouwer-Kloots, J. J., Davis, R. P., Elliott, D. A., Mummery, C. L., & Passier, R. (2015). Dual Reporter MESP1 mCherry/w-NKX2-5 eGFP/w hESCs Enable Studying Early Human Cardiac Differentiation. STEM CELLS.
[0267] Ellis-hutchings, R. G. & Ã, E. W. C. Whole Embryo Culture: A “New” Technique That Enabled Decades of Mechanistic Discoveries. 312, 304-312 (2010).
[0268] Hannan, N. R., Segeritz, C. P., Touboul, T., & Vallier, L. (2013). Production of hepatocyte-like cells from human pluripotent stem cells. Nature protocols, 8(2), 430.
[0269] Hendriks, G., Derr, R. S., Misovic, B., Morolli, B., Calleja, F. M. G. R., & Vrieling, H. (2016). The Extended ToxTracker Assay Discriminates Between Induction of DNA Damage, Oxidative Stress, and Protein Misfolding. Toxicological Sciences, 150(1), 190-203.
[0270] Hsu, P. D., Scott, D. A., Weinstein, J. A., Ran, F. A., Konermann, S., Agarwala, V., Zhang, F. (2013). DNA targeting specificity of RNA-guided Cas9 nucleases. Nature Biotechnology.
[0271] Lippmann, E. S., Estevez-Silva, M. C., & Ashton, R. S. (2014). Defined human pluripotent stem cell culture enables highly efficient neuroepithelium derivation without small molecule inhibitors. Stem Cells, 32(4), 1032-1042.
[0272] Piersma A. Session 3B: Teratological/Toxicological Aspects—Validation Studies, Industrial Applications. 7, 763-768 (1993).
[0273] Poser, I., Sarov, M., Hutchins, J. R. A., Hériché, J. K., Toyoda, Y., Pozniakovsky, A., Hyman, A. A. (2008). BAC TransgeneOmics: A high-throughput method for exploration of protein function in mammals. Nature Methods, 5(5), 409-415.
[0274] Uibel, F., Mühleisen, A., Köhle, C., Weimer, M., Stummann, T. C., Bremer, S., & Schwarz, M. (2010). ReProGlo: a new stem cell-based reporter assay aimed to predict embryotoxic potential of drugs and chemicals. Reproductive Toxicology, 30(1), 103-112.

The application's sequence listing, which the Patent Office published only in electronic form, follows.

SEQUENCE LISTING (106 sequences)

SEQ ID NO: 1 - DNA, 1500 bp, Human
caagtgggcaacttgaagaacaagtgccaaatagcacttctgtcatgctggatgtcagggctctttgtccactttgtatagccgctggcttatagaaggtgctcgataaatctcttgaatttaaaaatcaattaggatgcctctatagtgaaaaagatacagtaaagatgagggataatcaatttaaaaaatgagtaagtacacacaaagcactttatccattcttatgacacctgttacttttttgctgtgtttgtgtgtatgcatgccatgttatagtttgtgggaccctcaaagcaagctggggagagtatatactgaatttagcttctgagacatgatgctcttcctttttaattaacccagaacttagcagcttatctatttctctaatctcaaaacatccttaaactgggggtgatacttgagtgagagaattttgcaggtattaaatgaactatcttcttttttttttttctttgagacagagtcttgctctgtcacccaggctggagtgcagtggcgtgatctcagctcactgcaacctccgcctcccgggttcaagtgattctcctgcctcagcctcctgagtagctgggattacaggtgcgtgccaccgtgcccagctaatttttgtgtttttagtagagacggggtttcaccatgttggccatgctggtcttgaactcctgacctcgtgatctgcccacctcggcctcccaaagtgctggaattataggcgtgagccaccgcgcccagcaaagaacttctaaccttcataacctgacaggtgttctcgaggccagggtctctctttctgtcctttcacgatgctctgcatcccttggatgtgccagtttctgggggaagagtagtcctttgttacatgcatgagtcagtgaacagggaatgggtgaatgacatttgtgggtaggttatttctagaagttaggtgggcagcttggaaggcagaggcacttctacagactattccttggggccacacgtaggttcttgaatcccgaatggaaaggggagattgataactggtgtgtttatgttcttacaagtcttctgccttttaaaatccagtcccaggacatcaaagctctgcagaaagaactcgagcaatttgccaagctcctgaagcagaagaggatcaccctgggatatacacaggccgatgtggggctcaccctgggggttctatttggtgggttcccctctgcagattctgaccgcatctcccctctaaggagtatccctgaacctagtggggaggggcaggggcagactaccctcacccatgaagaggagtagggagagggagaagatgctttgagctccctctgggaagaggtggtaagcttggatctcagggtcacaagggccctgcgtgctccctcactttgcttctcttttgactggcctcccccagggaaggtattcagccaaacgaccatctgccgctttgaggctctgcagcttagcttcaagaac

SEQ ID NO: 2 - DNA, 1500 bp, Human
cgcgccgagaaccgggttctccgtgcgctgcgccagtagccctgggagcgcggcggccgcggggcaccggccgagggctctgccgagcgccgccgggagctcctcccggaccgctgaggctcgggcggcgggcgcggaggttggcctcgcctggaggggcgggcccgcgaggggcggggggctgtggaggaggggagggcgcgcaagccctttcgccgcctgccgcgggaggggcctcggcgctcacgtgactccgaggggctggaagaaaaacagagcctgtctgcggtggagtctcattatattcaaatattccttttaggagccattccgtagtgccatcccgagcaacgcactgctgcagcttccctgagcctttccagcaagtttgttcaagattggctgtcaagaatcatggactgttattatatgccttgttttctgtcagtgagtagacacctcttccttccccctccccggaattcactctgccctcaccacccctgctcgccggctgtcccttccgtcggacctcctttacaatatccacactctgctccctggcagcactgtcgctcccttcttggcccggcagccggggcgctggaagcgtacgggttccttttaaagtgctgctagcgcgcactcgccctctcagcgttgcaagaaaggggagcgcgagggagctaaagagatgaaagcccggggttgtaccttgagggctaaccactcccttcccctatccaacttgtctgggagagcccccagtgtctccgtggcgcgttcccactctcttgtcaaaactcacagaggtctctccggaatcgtctctcaccccttccctggggatgagcgggcacgatcaggcacttttggctgaatatttcaaactcatcggccacaataaaataagccctcaagccacccggttagctcccagaccaccttctcggcttctggaccctgtcgccctctgtcttcgcccagcccctgcctctcactttccctccctctggctctgaaccaactggaagttgtgaaagttgggctctgagggtggaggaaaagggagagaagctgaaggtctaaagtggagagcaatgccattttaattctccctcccccaccccttttcaccccctcaatgttaactgtttatccttcaagaagccacgctgagatcatggcccagatagcagttaggacaaaaaaagattaacaggatggaggctatctgatttggggttatttgactgtaaacaagttagaccaagtaattacagggcaattcttactttcaggccgtgcatggctgcagctggtgggtgggcgggtggtgtgagggagaagacacaaacttgatctttctgacctgctttccatcttgcccctccatttctagccctaaatgcatatgcagacacatctctatttctccctatttattggtgtttatttattctttaaccttccactcccctccccctccccagagacacc

SEQ ID NO: 3 - DNA, 1500 bp, Human
gggaaggagaggctggggaacaggggaggaaagcccatggttgggaggcggaggacaggcatttggcctgcaggagaaggtgaccctcacccatgttttcagttcacccttcgggttaaaaataactgaggtaagggccatggcagggtgggagaggcggtgtgagaaggtcctgtcttcccactatctgctcatcagccctttgaaggggaggaatgtgcccaaggactaaaaaaaggccgtggagccagagaggctggggcagcagacctttcttgggcaaatcagggggccctgctgtcctcctgtcacctccagagccaaaggatcaaaggaggaggagccaggaggggagagaggtgggagggagggtccctccggaaggactccaaatttagacagagggtgggggaaacgggatataaaggaactggagctttgaggacagatagagagactcctgcggcccaggtaagaggaggtttggggtgggatgccctgcagcccgtccacagagcccccaccgtgagggacctccttcaccaggagtggggtgcaggtcagttggaggcctaagggctctattaaaactgcctatctccaggcccagggaagttccccctgacacaaggaggttccacaggaaacccagaaacctcttttctccttctctgactctccatttctttctctgcatcattctgagtctcctacatgttgtctccatctttccatcttccttcctcctttggatggcttccttcccttgatcctggttttatcttgcctcttggtcttcatcgacacttgtcacaatcatgcttctttgtctctctcccttgtccttccttcttggcacgtgttctcacctccctgcctctctgcttctaaccctgtttccacaccccgtccctcgcactcatattgactcggtgccctttcttttctgcctctgcgtctttccctttctgactccctggtctgtcctgcctgtctgcgctctggggctgcctccatccccgggtggcctgcctctgttgttcttcactctcctcatctgttcttctctctgcccggctctacctctgttgttccttgctccacccacggtccagattcttcaggattctccgtgaagggataaccaggtgagaactgcccccattttctctgcagagactggggcatgcttctcctgggagccggattgctggaccaggggtctgctgtcccaagcactcagcgccaacccttagcatactccagccaatgccaccccagggaaaccccttacagagattgtccttcagcatcacctcagagggcaggagaagcagagccctgagtaggggagggtgcaacagcaggtgcctctcccagggtggaggagaggagcgggggtagggaggggggctgcagaggacaaagccactcgctggagcctgggctccctcaggagtaacatagccctcctgtctctgacccaggggaagcaccaag

SEQ ID NO: 4 - DNA, 1500 bp, Human
ttcctttgggaaaggtagggaggtgttcgtacgggagcagcctcggggacccctgcactgggtcagggcttatgaagctagaagcgtccctctgttccctttgtgagttggtgggttgttggtacatttggttggaagctgtgttgctggttagggagactcggttttgctccttgggttcgaggaaagctggagaatagaagccattgtttgccgtctgtcggctttgtcgaccacgctcaccccctcctgttcgtactttttaaagcagtgaggcgaggtagacagggtgtgtcacagtacagttaaaggggtgaagatctaaacgccaaaagagaagttaatcacaataagtgaggtttgggataaaaagttgggcttgcccctttcaaagtcccagaaagctgggaggtagatggagagggggccattgggaagtttttttggtgtagggagaggagtagaagataaagggtaagcagagtgttgggttctgggggtcttgtgaagttccttaaggaaggagggagtgtggccctgcagccctcccaaactgctccagcctatgctctccggcaccaggaagttccaaggttcccttcccctggtctccaaacttcaggtattcctctcccctcacaccccttcaacctcagctcttggcctctactccttactccactgttcctcctgtttcccccttccccttttcctggttctttatatttttgcaaagtgggatccgaacttgctagattttccaattctcccaagccagaccagagcagcctcttttaaaggatggagacttctgtggcagatgccgctgaaaatgtgggtgtaatgctgggacttagagtttgatgacagtttgactgagccctagatgcatgtgtttttcctgagagtgaggctcagagagcccatggacgtatgctgttgaaccacagcttgatatacctttttctccttctgttttgtcttagggggaagactttaactaggggcgcgcagatgtgtgaggccttttattgtgagagtggacagacatccgagatttcaggcaagttctgtggtggctgctttgggctcaaaacccacaaacagtcaaaacaaactatttcagtatgcttcttcactatagttcagatagaagaaaataaatcaaaattggggcatcgcttctactgattaaagggttaactgctaaagaatgtaggggaaacagattggggatattccagtactttgtttcaagccccaaagggtagattttgtatgcactgcagggcagagctgagtgaccctcagatcgccccaagaggttgagtggatcaattcctaaagaacggagattctcctgtcctagccccaggtccacctcggttgggagttcaggcctacctgatgcagctgcccgaggattaactcctattttcttgctaacagagccccatattcgagccccgtggaatcccgcggcccccagccagagccagc

SEQ ID NO: 5 - DNA, 1500 bp, Human
cacaggctaacccagaacagaagacaatttttgaacccaagagctgctggggaaataaaagtatacgattgctggagtttctaatttctattaagcagtccctctggaagacagagaggacagagacgctcttgaagtcaactccatatgccccatcattgattcctggattcttctctcctcacccctccctccccacctcctgccctgtttgttttagttacgaaatgctgtgggcacctcggttgtgactgaaaagtaaccttgaaacacgccggcctgaatatcagagacaaatctcagcctcccaaccgtcggccgctgctagaggggctgcttgcgccaggcgccggccgccccactgcgggtccctggcggccggtgtctgaggagtcggagagccgaggcggccagaccgtgcgccccgcgcttctcccgaggccgttccgggtctgaactgtaacagggaggggcctcgcaggagcagcagcgggcgagttaaaggtgtgtacgtagtttttctaaataggacagcgctttgcaaattggctgtcatggacttgctgttttgacagagaatgagcactgagagcgaagaaacccggcataaataaatccggctttcatagggatctgccgggcactgaggctggacgcgccctccgacaggcgcaccgggcgcccggcgcgatgagacggggcgggggctggaggccggagccgccccagagggtggtttcctcccaggtccctccttcctcaggggactcgctgtggacccgggaggaaagggggctcgaccagggatcccgcgtgcccgatcgcccgcccagcccgctcccctggcccgcccaggagtgcggggcgccgcggcggtggggcggacggcaggcgctgaggggcaggtgcggagcgccggctgcggctacctctcacctaggtgtgagctgattattcaaatgggctgccccgggtctggggattggaggcccgcgccagcgcgccgcgctatatcaccagcctcccacgtcactgcggcacttgtccgctccgcggtccacacctcctcctcctcctcctcctcctcctcctcctcctcctcctccaccaccaccaccgcctcctcctcctccttcctcctcctcctccccacccccccactagcccccgcgccgcgcgcttcccgccgcctcggggcagctcggcactgccaacctcagccgccacccggcagcccgtgagcgcggcggcggcgggtgctccctaccgcggggcgctggcctgggcctcctccgctcctcgcccccccccacctcccgcccacttccaactaccgcctccggcctgcccagggagagagagggagtggagcccagggagagggagcgcgagagagggagggaggaggggacggtgctttggctgacttttttttaaaagagggtgggggtggggggtgattgctggtcgtttgttgtggctgttaaattttaaactgcc

SEQ ID NO: 6 - DNA, 1500 bp, Human
atgcaggaatggctgttagttgccctcaaaaaccaacacaaatacacaaacacaacagcctggcttagtgattattaagagctgcaagtctgaaggcggactgctgggtgtgaattccaccttctcaacgctgtagtctccagcaagttccttaacttctctgcctccgtttcctttcctgtaagatagagtctacctcagggttaatatgaggatatgcttctttgctaatgctggagggcgctaggaatagcagtggcaggctgtgtcatttctcagtgttgtataacggcttgttttaaaagtcccactgaaaactttttttttttccagatcgaaacacaagtttaatagtcattcagatttcattccagtctaaagaaacttatagaaatctaattatctgccagaataaccgctttaaactgactgtaagaaccacagttactttgcagctaaaacagattgttctcttcccccaaacaaactcggacatttagacaaatattgctgctgtctttacattttagaaatcagtattaaggctcacctgttactgaacacatacgagaaacagttttgttatgcgtatcttatatacatcatgtatacattttcgtactttcacatgatgtgtataataagatacacataaaaactggttggcttgtcatgagtaaatgctttattctttagagtgaaggaatattggatacagaacgtcgttccatatttaatcttgctttagaaaattaggatttatcttggacacagcattttgaatataacacaggcaagttgagtcctgggggaaaaattgtatttttaaatttattatcaacggtgtctttcgcatttgagaaaacacatttgaagatgcccatgcagttccttggaagtaaactaggtcacccaccactgaaacaccctcggcttctgcaaaaagatgtgctttaaagagaatagaatggacgctcggtatgttcatctaaacgaccttgggcaagtacgtcgattccaaggtacaatcagccctcccagacggcttttcgagtctccctaaccccggtgggagaggacgcggcgccagagcccagctccggctagttttcccgggggcaggtgtagccttgggcgcggggccgggggaggggcaaggggcgggcgtggggttggactgggacgtgggactcggaccacggcctgggcgtgggcctaacgacgcgggaccggcccgccctcgccgctccattggccacatctgtgcagaaaaggccccgcggcccaggggcgcccgcagtgtcactaggccggctgggggccctgggtacgctgtagaccagaccgcgacaggccagaacacgggcggcggcttcgggccgggagacccgcgcagccctcggggcatctcagtgcctcactccccaccccctcccccgggtcgggggaggcggcgcgtccggcggagggttgaggggagcggggcaggcctggagcgcc

SEQ ID NO: 7 - DNA, 1500 bp, Human
ccttgagtcattaaaaaaaatcttcctatctatctatgtatctatcatccatctagctttgattttttcctcttctgtgctttattagttaattagtacccatttctgaagaagaaataacataagattatagaaaataatttctttcattgtaagactgaatagaaaaaattttctttcattataagactgagtagaaaaaataatactttgttagtctctgtgcctctatgtgccatgaggaaatttgactactggttttgactgactgagttatttaattaagtaaaataactggcttagtactaattattgttctgtagtatcagagaaagttgttcttcctactggttgagctcagtagttcttcatattctgagcaaaagggcagaggtaggatagcttttctgaggtagagataagaaccttgggtagggaaggaagatttatgaaatatttaaaaaattattcttccttcgctttgtttttagacataatgttaaatttattttgaaatttaaagcaacataaaagaacatgtgatttttctacttattgaaagagagaaaggaaaaaaatatgaaacagggatggaaagaatcctatgcctggtgaaggtcaagggttctcataacctacagagaatttggggtcagcctgtcctattgtatattatggcaaagataatcatcatctcatttgggtccattttcctctccatctctgcttaactgaagatcccatgagatatactcacactgaatctaaatagcctatctcagggcttgaatcacatgtgggccacagcaggaatgggaacatggaatttctaagtcctatcttacttgttattgttgctatgtctttttcttagtttgcatctgaggcaacatcagctttttcagacagaatggctttggaatagtaaaaaagacacagaagccctaaaatatgtatgtatgtatatgtgtgtgtgcatgcgtgagtacttgtgtgtaaatttttcattatctataggtaaaagcacacttggaattagcaatagatgcaatttgggacttaactctttcagtatgtcttatttctaagcaaagtatttagtttggttagtaattactaaacactgagaactaaattgcaaacaccaagaactaaaatgttcaagtgggaaattacagttaaataccatggtaatgaataaaaggtacaaatcgtttaaactcttatgtaaaatttgataagatgttttacacaactttaatacattgacaaggtcttgtggagaaaacagttccagatggtaaatatacacaagggatttagtcaaacaattttttggcaagaatattatgaattttgtaatcggttggcagccaatgaaatacaaagatgagtctagttaataatctacaattattggttaaagaagtatattagtgctaatttccctccgtttgtcctagcttttctcttctgtcaaccccacacgcctttggcaca

SEQ ID NO: 8 - DNA, 1500 bp, Human
gtatttgctggaagtgctactgacggtaaaccctttttgtttaaatgtgtgccctagtagcttgcagtatgatctattttttaagtactgtacttagcttatttaaaaattttatgtttaaaattgcatactgctctttcattgaagaagttttgagagagagatagaattaaattcacttatcttaccatctagagaaacccaatgttaaaactttgttgtccattatttctgtcttttattcaacattttttttagagggtgggaggaatacagaggaggtacaatgatacacaaatgagagcactctccatgtattgttttgtcctgtttttcagttaacaatatattatgagcatatttccatttcattaaatattcttccacaaagttattttgatggctgtatatcaccctactttatgaatgtaccatattaatttatttcctggtgtgggttatttgattttataatcttacctttagaataatgaaacacctgtgaagctttagaaaatactggtgcctgggtctcaactccacagattctgatttaactggtctgggttacagactaggcattgggaattcaaaaagttcccccagtgattctaatgtgtagccaagatcgggaacccttgtagacagggatgataggaggtgagccactcttagcatccatcatttagtattaacatcatcatcttgagttgctaagtgaatgatgcacctgacccactttataaagacacatgtgcaaataaaattattataggacttggtttattagggcttgtgctctaagttttctatgttaagccatacatcgcatactaaatactttaaaatgtaccttattgacatacatattaagtgaaaagtgtttctgagctaaacaatgacagcataattatcaagcaatgataatttgaaatgaatttattattctgcaacttagggacaagtcatctctctgaattttttgtactttgagagtatttgttatatttgcaagatgaagagtctgaattggtcagacaatgtcttgtgtgcctggcatatgataggcatttaatagttttaaagaattaatgtatttagatgaattgcataccaaatctgctgtcttttctttatggcttcattaacttaatttgagagaaattaattattctgcaacttagggacaagtcatctctttgaatattctgtagtttgaggagaatatttgttatatttgcaaaataaaataagtttgcaagttttttttttctgccccaaagagctctgtgtccttgaacataaaatacaaataaccgctatgctgttaattattggcaaatgtcccattttcaacctaaggaaataccataaagtaacagatataccaacaaaaggttactagttaacaggcattgcctgaaaagagtataaaagaatttcagcatgattttccatattgtgcttccaccactgccaataacaaaataactagcaacc

SEQ ID NO: 9 - DNA, 1500 bp, Human
caccatgttggtcaggctggtctcaaattttttttttttttttttttttttgagacagagtcttgctctgttgtctaggctggagtgcagtggcatcgaactcttgacctcaagtgatccacccgcctcggcctcccaaagtgcttggattacaggcatgagccactgtgcccggcgatgtgggacacattatcatctctgtgagagatttttggtctcttttgtcaccgcccttctctcccagctcctagaactgggcctggctcacagtaggtgctgaatgcatactggttgaattgtaaatgctcaggatttgtttaattaaggatgcaggaaaggtgatataccggtgtgcagaagtcaggatgcattccctgtccaaatcacagtgttccactgaggcaaggcccttgggagtgaggtcgggagaggggagggtggtggagggggctcagagactgggtttgttttggggagtctgcacctatttgctgagtgaatgtatgtgtgtgtgcatttgagagcacacctctgtatgattcgggtgtgagtgtgtgtgaggaaacgtgggcaggcgaggagtgtttgggagccaggtgcagctggggtgtgagtgtgtaagcaagcagctatgaggctgggcattgcttctcctcctcttctccagctcccagcctttcttccccgggactcctggggctccaggatgcccccaagatcccctccacaagtggataatttgggctgcaggttaaggacagctagagggactcacaggccattccacccgcacaccaccagacccccaaatttcttttttctttttttttttttttttttttgagacagagtctcactctgtcgccaggctgcagtggcgcgatctcggctcactgcaacctccgcctcccaggttcaagcgattccccttcctcagcctcccaagtagctgagactacaggcgtgcaccatcacgtccggctaattttttgtattttagtagagagggggtttcaccatgttggctaggatggtctcgatctcctgacctcgtgatccgcccacctaggcctcccaaagtgctgagattacaggcgtgagccactgcgcccggtcaagactcccaaatttcaaactcgccagcacctcctccacctgggggagaagagcataataacgtcatttcctgccctgaaagcagcctcgagggccaacaacacctgctgtccgtgtccatgcccggttggccaccccgtttctggggggtgagcggggcttggcagggctgcgcggagggcgcgggggtggggcccggggcggagcggcccggggcggagggcgcgggctccgagccgtccacctgtggctccggcttccgaagcggctccggggcgggggcggggcctcactctgcgatataactcgggtcgcgcggctcgcgcaggccgccaccgtcgtccgcaaagcctgagtcctgtcctttctctctccccggacagc

SEQ ID NO: 10 - DNA, 1500 bp, Human
ttggtgtgcagcccagaaatgtggcaactttgggttacccaaccttcctaggcggggaggtagtccagtccttcaggaagagtctctggctccgttcaagagccatcacagtcccttgtattacatccctctgacgggttccaataggactatttttcaaatctgcggtatttacagagacaagactgggctgctccgtgcagccaggacgacttcagcctttgaggtaatggagacataattgaggaacaacgtggaattagtgtcatagcaaatgatctagggcctcaagttaatttcagccggttgtggtcagagtcactcatcttgagtagcaagctgccaccagaaagatttctttttcgagcatttagggaataaagttcaagtgccctgcgcttccaagttgcaggagcagtttcacgcctcagctttttaaaggtatcataatgttattccttgttttgcttctaggaagcagaagactgaggaaatgacttgggcgggtgcatcaatgcggccgaaaaagacacggacacgctcccctgggacctgagctggttcgcagtcttcccaaaggtgccaagcaagcgtcagttcccctcaggcgctccaggttcagtgccttgtgccgagggtctccggtgccttcctagacttctcgggacagtctgaaggggtcaggagcggcgggacagcgcgggaagagcaggcaaggggagacagccggactgcgcctcagtcctccgtgccaagaacaccgtcgcggaggcgcggccagcttcccttggatcggactttccgcccctagggccaggcggcggagcttcagccttgtcccttccccagtttcgggcggcccccagagctgagtaagccgggtggagggagtctgcaaggatttcctgagcgcgatgggcaggaggaggggcaagggcaagagggcgcggagcaaagaccctgaacctgccggggccgcgctcccgggcccgcgtcgccagcacctccccacgcgcgctcggccccgggccacccgccctcgtcggcccccgcccctctccgtagccgcagggaagcgagcctgggaggaagaagagggtaggtggggaggcggatgaggggtgggggaccccttgacgtcaccagaaggaggtgccggggtaggaagtgggctggggaaaggttataaatcgcccccgccctcggctgctcttcatcgaggtccgcgggaggctcggagcgcgccaggcggacactcctctcggctcctccccggcagcggcggcggctcggagcgggctccggggctcgggtgcagcggccagcgggcgcctggcggcgaggattacccggggaagtggttgtctcctggctggagccgcgagacgggcgctcagggcgcggggccggcggcggcgaacgagaggacggactctggcggccgggtcgttggccgcggggagcgcgggcaccgggcgagcaggccgcgtcgcgctcacc

SEQ ID NO: 11 - DNA, 3403 bp, Human
caagtgggcaacttgaagaacaagtgccaaatagcacttctgtcatgctggatgtcagggctctttgtccactttgtatagccgctggcttatagaaggtgctcgataaatctcttgaatttaaaaatcaattaggatgcctctatagtgaaaaagatacagtaaagatgagggataatcaatttaaaaaatgagtaagtacacacaaagcactttatccattcttatgacacctgttacttttttgctgtgtttgtgtgtatgcatgccatgttatagtttgtgggaccctcaaagcaagctggggagagtatatactgaatttagcttctgagacatgatgctcttcctttttaattaacccagaacttagcagcttatctatttctctaatctcaaaacatccttaaactgggggtgatacttgagtgagagaattttgcaggtattaaatgaactatcttcttttttttttttctttgagacagagtcttgctctgtcacccaggctggagtgcagtggcgtgatctcagctcactgcaacctccgcctcccgggttcaagtgattctcctgcctcagcctcctgagtagctgggattacaggtgcgtgccaccgtgcccagctaatttttgtgtttttagtagagacggggtttcaccatgttggccatgctggtcttgaactcctgacctcgtgatctgcccacctcggcctcccaaagtgctggaattataggcgtgagccaccgcgcccagcaaagaacttctaaccttcataacctgacaggtgttctcgaggccagggtctctctttctgtcctttcacgatgctctgcatcccttggatgtgccagtttctgggggaagagtagtcctttgttacatgcatgagtcagtgaacagggaatgggtgaatgacatttgtgggtaggttatttctagaagttaggtgggcagcttggaaggcagaggcacttctacagactattccttggggccacacgtaggttcttgaatcccgaatggaaaggggagattgataactggtgtgtttatgttcttacaagtcttctgccttttaaaatccagtcccaggacatcaaagctctgcagaaagaactcgagcaatttgccaagctcctgaagcagaagaggatcaccctgggatatacacaggccgatgtggggctcaccctgggggttctatttggtgggttcccctctgcagattctgaccgcatctcccctctaaggagtatccctgaacctagtggggaggggcaggggcagactaccctcacccatgaagaggagtagggagagggagaagatgctttgagctccctctgggaagaggtggtaagcttggatctcagggtcacaagggccctgcgtgctccctcactttgcttctcttttgactggcctcccccagggaaggtattcagccaaacgaccatctgccgctttgaggctctgcagcttagcttcaagaacatgtgtaagctgcggcccttgctgcagaagtgggtggaggaagctgacaacaatgaaaatcttcaggaggtaagggtgggagggggatacccggggaccttccctttcttggcctaatttccattgcttccatcactggctcgtagctctccgtctttggtgcagtggttctcagtgggatggagtgaaattcctcagttctgctgggataaggtccagagccaacccttccaggatcctgccttttcacaccaccacctggctctgctgacacatctagtcacagacccctgtgatgctgttactcagcaagtccaaagcttgcccttgtcacccccttcccacctgcacagatatgcaaagcagaaaccctcgtgcaggcccgaaagagaaagcgaaccagtatcgagaaccgagtgagaggcaacctggagaatttgttcctgcagtgcccgaaacccacactgcagcagatcagccacatcgcccagcagcttgggctcgagaaggatgtgagtgccatgtctctctgcgggctccatctctttcccctgtcaccacctcgctttccctagctctggctcctccaactgctctagggctgttggctttggacagaatgtccaagcagtcaggcctgtctcagctcattctctaatgtcctcctctaactgctctagggctgttggctttggatagaatgtccaagcagagtcaggcccgtctcagctcattgtctaatgtcattctcctttctgtcattcacttgcaggtggtccgagtgtggttctgtaaccggcgccagaagggcaagcgatcaagcagcgactatgcacaacgagaggattttgaggctgctgggtctcctttctcagggggaccagtgtcctttcctctggccccagggccccattttggtaccccaggctatgggagccctcacttcactgcactgtactcctcggtccctttccctgagggggaagcctttccccctgtctccgtcaccactctgggctctcccatgcattcaaactgaggtgcctgcccttctaggaatgggggacagggggaggggaggagctagggaaagaaaacctggagtttgtgccagggtttttgggattaagttcttcattcactaaggaaggaattgggaacacaaagggtgggggcaggggagtttggggcaactggttggagggaaggtgaagttcaatgatgctcttgattttaatcccacatcatgtatcacttttttcttaaataaagaagcctgggacacagtagatagacacacttatcttggtttgtccttcagttactgaggtagggatgggaatatccaatgctcatacccaagtgaccctgaaactaaggtgccatttacactccttaaggtcacacaacatcagagggagagctgggattgcagccaagtttatttgtacagggccctgtgataggctagttcccaaaagcctgtgatgcaagaacttttgcccatagactcagtcaccatgtagctgttacctgttcagagctggctttttgctttcccaccctactctggaattcttaaatggctttatacttagaaatcatcttatttctgttgaacctagatcaccccaaccagaaacttctattaatactttgtgctttcttgataccagggtctatttggtttccacttaaggtttttgcatactctgcccataagtgactcattagttactcaagttttattcctggctctgccactagttcattaggggtctttgccccagagtcatttcttccattttaaaaacttgggctcattaaatctaggtaggaaagggcgggtgtggcaggttttaatagaacaggtcaagataaggctttatttctatagaaatga

SEQ ID NO: 12 - DNA, 4587 bp, Human
cgcgccgagaaccgggttctccgtgcgctgcgccagtagccctgggagcgcggcggccgcggggcaccggccgagggctctgccgagcgccgccgggagctcctcccggaccgctgaggctcgggcggcgggcgcggaggttggcctcgcctggaggggcgggcccgcgaggggcggggggctgtggaggaggggagggcgcgcaagccctttcgccgcctgccgcgggaggggcctcggcgctcacgtgactccgaggggctggaagaaaaacagagcctgtctgcggtggagtctcattatattcaaatattccttttaggagccattccgtagtgccatcccgagcaacgcactgctgcagcttccctgagcctttccagcaagtttgttcaagattggctgtcaagaatcatggactgttattatatgccttgttttctgtcagtgagtagacacctcttccttccccctccccggaattcactctgccctcaccacccctgctcgccggctgtcccttccgtcggacctcctttacaatatccacactctgctccctggcagcactgtcgctcccttcttggcccggcagccggggcgctggaagcgtacgggttccttttaaagtgctgctagcgcgcactcgccctctcagcgttgcaagaaaggggagcgcgagggagctaaagagatgaaagcccggggttgtaccttgagggctaaccactcccttcccctatccaacttgtctgggagagcccccagtgtctccgtggcgcgttcccactctcttgtcaaaactcacagaggtctctccggaatcgtctctcaccccttccctggggatgagcgggcacgatcaggcacttttggctgaatatttcaaactcatcggccacaataaaataagccctcaagccacccggttagctcccagaccaccttctcggcttctggaccctgtcgccctctgtcttcgcccagcccctgcctctcactttccctccctctggctctgaaccaactggaagttgtgaaagttgggctctgagggtggaggaaaagggagagaagctgaaggtctaaagtggagagcaatgccattttaattctccctcccccaccccttttcaccccctcaatgttaactgtttatccttcaagaagccacgctgagatcatggcccagatagcagttaggacaaaaaaagattaacaggatggaggctatctgatttggggttatttgactgtaaacaagttagaccaagtaattacagggcaattcttactttcaggccgtgcatggctgcagctggtgggtgggcgggtggtgtgagggagaagacacaaacttgatctttctgacctgctttccatcttgcccctccatttctagccctaaatgcatatgcagacacatctctatttctccctatttattggtgtttatttattctttaaccttccactcccctccccctccccagagacaccatgattcctggtaaccgaatgctgatggtcgttttattatgccaagtcctgctaggaggcgcgagccatgctagtttgatacctgagacggggaagaaaaaagtcgccgagattcagggccacgcgggaggacgccgctcagggcagagccatgagctcctgcgggacttcgaggcgacacttctgcagatgtttgggctgcgccgccgcccgcagcctagcaagagtgccgtcattccggactacatgcgggatctttaccggcttcagtctggggaggaggaggaagagcagatccacagcactggtcttgagtatcctgagcgcccggccagccgggccaacaccgtgaggagcttccaccacgaaggtcagtctcttcccccagtctgcgtgggggagggctggtgggactggctagaggggcagtgaaagccctggggaagaagagttcgggttacatcaaagccccagtccaggaggctgaggaacagagctgcttacctccaagaatttgcagagctgccgccgaacttattttttggagacagagggggaggtgttcaggggaaggggaatgacagcactcagacgtgggctagccccagcggtgtgtttttgctatatcaaagccttttctgctaggttttctgcccgtttttttcaaagcacctactgaatttaatattacagctgtgtgtttgtcgggtttattcaataggggccttgtaatccgatctgaatgtttcctagcggatgtttcttttccaaagtaaatctgagttattaatccaccagcatcattactgtgttggaatttattttcccctctgtaacatgatcaacaaggcatgctctgtgtttccaagatcgctggggaaatgtttagtaacatactcaatagtggaagagggagagggtggttgtctgcatgtttcctcctgcctgtgctctgttggcccctctttttctttacaaccacttgtaaagaaaactgtggacacaaagccaaggtggggggtttaaaagaggagtctgattgtggtgccatagaggagttgacacatagaaattattagacatatcaaggaggctggatatagtttctgtctttggtgcttgagaaatgctagctacattttgctggtttgttagctgccccacttatctgctccttcaaattaaggggtatgcttattttcccccagtaggtttcccctgcataagcagaattcaccattcattgcccaaccctgagctatctcttgactcttccatctttgaaaaaagttcatatgctttttcttttccccttccttcctaactgtgcctagaacatctggagaacatcccagggaccagtgaaaactctgcttttcgtttcctctttaacctcagcagcatccctgagaacgaggtgatctcctctgcagagcttcggctcttccgggagcaggtggaccagggccctgattgggaaaggggcttccaccgtataaacatttatgaggttatgaagcccccagcagaagtggtgcctgggcacctcatcacacgactactggacacgagactggtccaccacaatgtgacacggtgggaaacttttgatgtgagccctgcggtccttcgctggacccgggagaagcagccaaactatgggctagccattgaggtgactcacctccatcagactcggacccaccagggccagcatgtcaggattagccgatcgttacctcaagggagtgggaattgggcccagctccggcccctcctggtcacctttggccatgatggccggggccatgccttgacccgacgccggagggccaagcgtagccctaagcatcactcacagcgggccaggaagaagaataagaactgccggcgccactcgctctatgtggacttcagcgatgtgggctggaatgactggattgtggccccaccaggctaccaggccttctactgccatggggactgcccctttccactggctgaccacctcaactcaaccaaccatgccattgtgcagaccctggtcaattctgtcaattccagtatccccaaagcctgttgtgtgcccactgaactgagtgccatctccatgctgtacctggatgagtatgataaggtggtactgaaaaattatcaggagatggtagtagagggatgtgggtgccgctgagatcaggcagtccttgaggatagacagatatacacaccacacacacacaccacatacaccacacacacacgttcccatccactcacccacacactacacagactgcttccttatagctggacttttatttaaaaaaaaaaaaaaaaaaggaaaaaatccctaaacattcaccttgaccttatttatgactttacgtgcaaatgttttgaccatattgatcatatattttgacaaaatatatttataactacgtattaaaagaaaaaaataaaatgagtcattattttaaaggtaaatcatgattttttttttctccttaatcctttctcttttccttcgggctcatctcttttgaatgaggcttttttctgttcaggtgagttggaggctggatggaagtcaaaaggtggtacctggaggtggttaagttgtagggacaggaagtaaactgttggcagagagagatggtaattgccagcatgaattgttttctatttctatttaatgttaacaaggatgcagtatcctctcccatctggatgacacatgccttggagaaacactgggatgaaaggagtgtaggtcagattaaagacttcatttcaggccccttgtacatcttctgtttcactcacctgttgaggtgtatcacagctgagcgtgatgaggtctcaaccctagaaaaatgatacccacctctgctttcatgatacctcagggtatctccagttattacaggtaccaatgtgatatttccaaatcaaaactaatttgtacactaacatcataatgtgtgtgtgaaggcatgtttttaaacttattttttttttctccaggtaggactcttttgttttttcttttgtctttttttttttttgaaacaagttctctctttg

SEQ ID NO: 13 - DNA, 27342 bp, Human
gggaaggagaggctggggaacaggggaggaaagcccatggttgggaggcggaggacaggcatttggcctgcaggagaaggtgaccctcacccatgttttcagttcacccttcgggttaaaaataactgaggtaagggccatggcagggtgggagaggcggtgtgagaaggtcctgtcttcccactatctgctcatcagccctttgaaggggaggaatgtgcccaaggactaaaaaaaggccgtggagccagagaggctggggcagcagacctttcttgggcaaatcagggggccctgctgtcctcctgtcacctccagagccaaaggatcaaaggaggaggagccaggaggggagagaggtgggagggagggtccctccggaaggactccaaatttagacagagggtgggggaaacgggatataaaggaactggagctttgaggacagatagagagactcctgcggcccaggtaagaggaggtttggggtgggatgccctgcagcccgtccacagagcccccaccgtgagggacctccttcaccaggagtggggtgcaggtcagttggaggcctaagggctctattaaaactgcctatctccaggcccagggaagttccccctgacacaaggaggttccacaggaaacccagaaacctcttttctccttctctgactctccatttctttctctgcatcattctgagtctcctacatgttgtctccatctttccatcttccttcctcctttggatggcttccttcccttgatcctggttttatcttgcctcttggtcttcatcgacacttgtcacaatcatgcttctttgtctctctcccttgtccttccttcttggcacgtgttctcacctccctgcctctctgcttctaaccctgtttccacaccccgtccctcgcactcatattgactcggtgccctttcttttctgcctctgcgtctttccctttctgactccctggtctgtcctgcctgtctgcgctctggggctgcctccatccccgggtggcctgcctctgttgttcttcactctcctcatctgttcttctctctgcccggctctacctctgttgttccttgctccacccacggtccagattcttcaggattctccgtgaagggataaccaggtgagaactgcccccattttctctgcagagactggggcatgcttctcctgggagccggattgctggaccaggggtctgctgtcccaagcactcagcgccaacccttagcatactccagccaatgccaccccagggaaaccccttacagagattgtccttcagcatcacctcagagggcaggagaagcagagccctgagtaggggagggtgcaacagcaggtgcctctcccagggtggaggagaggagcgggggtagggaggggggctgcagaggacaaagccactcgctggagcctgggctccctcaggagtaacatagccctcctgtctctgacccaggggaagcaccaagatgaccgatgcccagatggctgactttggggcagcggcccagtacctccgcaagtcagagaaggagcgtctagaggcccagacccggccctttgacattcgcactgagtgcttcgtgcccgatgacaaggaagagtttgtcaaagccaagattttgtcccgggagggaggcaaggtcattgctgaaaccgagaatgggaaggtgagtagggcatggcgccggggcagaagggaaggaggtctgggaaagaagatgcagaggtggagccacttgcagggggagctgagagggctggagaaaagccaaggccagtggggatgccaggacatgctcctttgaggagcccagaatctgatccctctcaaattgacctgagctggtgcaacaggtgccacccagggccatgttccccctgccagagaggatgctgaggaagaagaacctcagtgttcgcctaagaggggtcttgtagataaagagggcacagacacagcattaaatgatgcccccttcttgcacttgtatccctcttccctgtgcctcagtttcctccatgagtccactttctcaaattccgttcacccaaatcaagagtaattcttagacccagatgaacacaaagatcagaaacttttgagctgagcactctccttgactggcactcagaagctctggtccctggtttgctcacaccagccaagagaatcacccctggttaccagctgcggctcagggctgtgtgcctcatgaactcgttgactgaatgttacaacccattgaagtgtagaataacaggccacaatcccctggggcttttgactctgatcccagctctgccacccgctagtcactgtgcaggcaaatcatttagtcatttagagccacggatttctccactataaaaaacactggaatacctactggcaggatctaatgacatcagggcatggcaaactgactgctgccaatcaaaccacaccaacagtgatggatggggagtgtggagtagatgggtgaactacttttccagcaggggtgaaggtttgccctgagcaacagataccctaaagcgctgcccgcgggagacagcctcggggtcagcataaggtgtgcacagatctgagagctgccaatctccaggtctgccccaagacccttggaacatagggactgaagagtgatggtcatgggcacagggtgtccccaggatggtctggggatctggcaagagaaaggtaccctaggacagtctctaggatgggagatacaatgggaagggaaattacctggggaaagtgtcccaggggacatcggggtaggggccggggcactggtcagagcaaggggagcaaggccaagtccctgtgtcctgggaggaggtcagtgggcagtgctggcaagggtcccggagggattgtggtcactcatcctcctgcttatgcgccccctccagacggtgactgtgaaggaggaccaggtgttgcagcagaacccacccaagttcgacaagattgaggacatggccatgctgaccttcctgcacgagcccgcggtgcttttcaacctcaaggagcgctacgcggcctggatgatatatgtgagtggctcctgcacactgcagaggcttcctgtgctgcgtggaggcctaaataagccaggggggctctcccaagaagagggggagagactcccaagggacccaagtccccttcccccctccacccctagtcagctgcaggaggagtagagccagctggagtgaacagggacatgcctggctgccaccactgcctgtcccaggctctccccaccaacctcatgcccagccttgtctcctgctccagacctactcgggcctcttctgtgtcactgtcaacccctacaagtggctgccggtgtacaatgccgaggtggtggccgcctaccggggcaagaagaggagtgaggccccgccccacatcttctccatctccgacaacgcctatcagtacatgctgacaggtgagcctggtggcccctggtctctgctcctcctcccagacacccacccagatcctcagccctgaccccattgcttctcctcttttttcttccagatcgggagaaccagtccatcctcatcacgtgagcgagtgccatcctcccacagaagggactgggctgggggcatacacgctgatgcctagggtgtagttgggaggagaggtttaaggctgggattgcagggagcatggggcactgagctctcattagaggggtgccagagcaatgaaccatgtcaggcaaatcctgctgggtgctgggctctgatggccaggctgggaaggggagcatgtgatgctgagccctgtatggagaacagtaggaatcctgagttttgattggtctctgtggcccccaggggagaatccggggcggggaagactgtgaacaccaagcgtgtcatccagtactttgccagcattgcagccataggtgaccgtggcaagaaggacaatgccaatgcgaacaaggtgccatgggggacacaggctcggcagaacaggggttggggggcaggctgacccgagttacccctaaccctcccctccctgtgacgtggtggggacagccacactgagctgggctcccgatggtcagcccagtatggaagaccttcctgacaggagacactcaccctgaggtctgggtaggatcctgtggagtcgcagacccactagcggttcacccagccccgcacccccattcctcagggccagggcagcctccctgccctctcaccactgcctggaggtggatggaggatgaacccatgcagttctgctcctttcatagggcaccctggaggaccagatcatccaggccaaccccgctctggaggccttcggcaatgccaagactgtccggaacgacaactcctcccgctttgtgagtgcctttgaccactcccagtggcctcatccagccttgacaagaaaaagggggtgctgttttgccacacccagttgattgtactgtatctggctttgggatatcaacatgcacacgttggtgggaagagagcataggctttggagccaaaggtctgactttccacttgctcagcaagtccttacacctctctgagccctagttccttcacctgtgaaacagggggactaatatccaccctgcagattactgggaggattaggtgagatcatatgagaggtatgagcaggaggcattctgtatgtgttcccctctgggccgaggttccactaggaggtccctgcacagtgtgtgagggtggcatcctctgcccggcttcacttatactcaactgagacaccaaagaggtcgtttacatttccagaaccatccagggcttctgggctgaacagagggccaggatttcactctgtccttcccgccagttccctcactctgtcccattcgtccccaggggaaattcattaggatccactttggggccactggaaagctggcttctgcagacatagagacctgtgagtaccagcagggaggctgccaccctctaggtccccctctgccttctctccctgcctggcggccagtctcatcattcctgccatctcctgttttgtctgcatttgcctctgggctttaggatcctttttatttaagccacatcttctcgcctggccctcttcatcaagctgtgggtgccccctgccctctgcccccatggccacctttttctggctctactctctttccttcctcacctgccttcctcccctccacccacctcagacctgctggagaagtcccgggtgatcttccagctgaaagctgagagaaactaccacatcttctaccagattctgtccaacaagaagccggagttgctgggtgaacctgcctgccaccccccacccactgctgtccctgctgcacaccccaacgactcctgcatgcagggcagggccctcctgctccccactgtgccccaccttgctgctcacttcccttctccctccactcactccgccagctccctctcgcttccctcccaagaccacctgcgtctcctctcgcctccctgtgcagtcacacacctcactccttctccacccttctctccactcctccctcggcttgtctttgccttctcctctttatttgcctccccatctcccatgtgtcactcccctgccaccctccctcctccttgttactggagcccctgccagggcccctcttctaccctttcacttcctctgggttcactccttggtccttgctgacttctcttctctccctgctccctgtcctcccttcctccattcaccccgtcccttacccctccctgcccctccctccctttcccaactctacctgccccttccctgccctccgcctgcccccttgcccctgcctcaccccttgcctggtgcagacatgctgctggtcaccaacaatccctacgactacgccttcgtgtctcagggagaggtgtccgtggcctccattgatgactccgaggagctcatggccaccgatgtgagtgagggggctgctgcggccgttcgagggaccccaggagctcctggggccaccgctccaacccccctctttgtctctcgctctgtcccagagtgcctttgacgtgctgggcttcacttcagaggagaaagctggcgtctacaagctgacgggagccatcatgcactacgggaacatgaagttcaagcagaagcagcgggaggagcaggcggagccagacggcaccgaaggtgggaggggcaggcaggcagccctgggaaggcctgaggtgctgaccaggctctctgcgggactcagatcccagagactctgaggcttgtggggcagtggggtgtgttgtgggatggtgagggacagggacgtgggagacgtgggcagacagagagtccaccacaatcccaactcctcaaccccagctgcactcaccagaactgaggtggggaattttcctcctgtgcccaagactcccccagccccaggaagcacagcccctgagctctgcacatcaccatcactaatgcagggcctttgcctgcccagcccttgggtaagcccctcgtgggctcataccatgttgtttgggaggcagtgggccaggggtcaggacatagcccagggcattggtgtgtcagtttcctcctcagtgaaatggatcaacaatctttcctcactcctctggtggctactgtgaggtcctttgagaaaatgtgaaggtgcaaacagtgctagacaggtgcccaagaacattcctccctaccttcagggacccttctccaagtctgcccagatcaaagtgtcaagctggggttcatgataacacaccaacagttattacaacattcttgaaattacaccaaataactcctcctctaaacagagaaatacccatgttgggtggcacatttggatggctgggggtaggagcgtggtactgtctgatatactctcagccagtcagattgggtaacatgtggatggagaagacagcatggccagtccagggctagacactggggtagagaacgaaggagacagggagcagaggacatctagcccctcagccacacccttgccctggagaggcgagggatatggtgaaggtggggatatgcccacagcagtgcttgtgaaagacctgacccagagatgccacagatgtagagacagagctgagaagagccagttgtggcaagaggccatgggccggataagggggctgtgctccagcctgactcaggcacacgttggttgagtaaccaaggcaagccctgtgctcttccaggccttgatttcttcctctttaaggaaaagaaattggacctgatgcttcctaaagtcttggccccaggacagggaaggaggctcactccctgaaagtgttcactcaggccaggtgcagtggctcatgcctgtaatcccagcactttgggaggccaaggcaggtggatcacttgaggtaaggagtttgagaccagcctgggcaacatggtgaaaccctgtctctactacagatacaaaaattagcctggcatggtggctcatgtctgtagtcccagctacttgggaggctgaggcaggaaaatcacttgaacccaggaggtggaggctgtagtgagccaagatcgtgccactgcactcaagcctgggtgacagagcaagcctctatcttaaaaaaaaaaaaaggaagtgctcacttatcctttccctctcaaccagatgctgacaagtcggcctacctcatggggctgaactcagctgacctgctcaaggggctgtgccaccctcgggtgaaagtgggcaacgagtatgtcaccaaggggcagagcgtgcagcaggtgtactactccatcggggctctggccaaggcagtgtatgagaagatgttcaactggatggtgacgcgcatcaacgccaccctggagaccaagcagccacgccagtacttcataggagtcctggacatcgctggcttcgagatcttcgacgtgagttgggacccctgggagtgggagaacaatcactcgcttgctcctacattcaacagccatttgctgagagccagctgtggaccagacatgggaaggcagtggggactgtgtggtgacagaggcagtcattgtccctgtcttcaggggaagccctcctccactgccctgacatggaggggacagccataccctgctgggctcggcacagtgcacgggcacagccccaatggccactcacacccactttctgactgctcccacccctcatgccccctgcagttcaacagctttgagcagctctgcatcaacttcaccaacgagaagctgcagcagttcttcaaccaccacatgttcgtgctggagcaggaggagtacaagaaggagggcattgagtggacattcattgactttggcatggacctgcaggcctgcattgacctcatcgagaaggtgcctccttggcctcaccacctatgccccctcctctgccatccagacaaagtggtggctgagtcccttctacacccaagaaactagagtcccaagaatcccaggcctttctccaggcccagcttctccccactgtgaagtcatgggcatgaacaggatgatccccccactcttcctttcccaggaccttgcactttatgcccctttgtggtggtcccctcagtgtcttaagagtgagatgtagtgaaggagaggcccctggcccctctgaccgcccatgagaagcgtcattcatggaaagatcctaggctgaaattagagatgtttggcctcccaccaccttcctgttggttgagaaataagccagtctccagccctcttgcttatgggcattcctcagaagagacaaggccgcaggcgggaggccccataggctggggctgacttgctctcagtgaacctctgctctttgtcagcataggccagagcccggattgtctgacccacacccagcccagccacggccttcatgaaatgggagcttccccacatgctttgggtcattatccagattcttaaccagagttctcatgtttcagagccctcagaatgccataaaactgtgtgtggaaaaaagcatgtgtacattcatacatacatgtgtgtgcttgtgcatgtgtgtgtgtgtacgtgtgtgtgtgtacatgcgtttttctggagagacagtctttagcttcaacaaattcttaaaaggattcctgccccaagaaaaatcaagaaccaccaggtttttggaagtgcagagtgtggtaaagaacctggatccttctatctaacccttgaagaattgctactggtgtcatacagacagagcctggcccggtgcctctgacacacatctgtccctgccctcctgcccctggggcagtgagccatcagagagaaggggctgtgctgtgaggcactgtgggccttgtggggggtgattaggagtgcatgactctttgttggacccactgggcagaaaggaggaggaaggggctttttaaattccaggaatattggcttcctgttttagggtaagaggtaccagcacagcgccccttcagcaggccagcgctactggctccagattccttttcctgtcagggtatgggactgtggaagcctgggagtgtgctcagtgattctctctttgcctcttcaccctgccctcagcccatgggcatcatgtccatcctggaggaggagtgcatgttccccaaggccactgacatgaccttcaaggccaagctgtacgacaaccacctgggcaagtccaacaatttccagaagccacgcaacatcaaggggaagcaggaagcccacttctccctgatccactacgccggcactgtggactacaacatcctgggctggctggaaaaaaacaaggatcctctcaacgagactgttgtggccctgtaccagaagtcctccctcaagctcatggccactctcttctcctcctacgcaactgccgatactggtaagcaggcagcccctgcactgggccaggggacttctgaagacacaaagggccagggtcctgctgcttcaaagcacatgactccataggcaggcacaggggagcccatgagtcaagccacctcctggctcacctcaccacagtccagctgggcttctgtagcacctgccgttctccactttgtgttatgagtgttgatatagctgtctcatgtttcctcaagatggggagtaactggaggtcagtgagggtggcacatgcatccctgtaccatgcccagcagggaacgatgcatgtgggagttctcaacaaatgttgagaggacactgaacaaaagagcctccagttcagaaaaggaagagaaaggatgtggcttgaaatgaagaggataaagtgtaagaagaaaagtagaggttgggcacggtggctcacgcctgtaatcccagcactttgggaggccgaggcgggtggatcacaaggtcaggagttcgagaccagtctggtcaacatggtgaaaccccgtctctactaaaaatacaaaaattagcctggcgtggtggcacctgcctgtagtcccagccacttgggaggctgaggcaggaaagttgcttgaatccgggcgacggaggttgcagtgagccaagattgcaccactgcactccagcatgggtgacagagtgagattccatctcaaaaatagaaggaagaagaagaagaagaagaagaagaagaagaagaagaagaagaagaagaagaagaagaagaagaagaagaagaagaagaagaagaagaagaggaggaggaggaggaggaggagaactagaatgtggaaagatataagaaggaagggcaagtagagggagagctaagggcactgatgtatgtcagtgcctactatgggcaagcaccagtgagctgccctacaggcgtggtcttatctaatcctctttacaactttgggaagttgttactgtcatcctcatggtaaactgaatcttggagaattccttgcccaaagtctcagagctaccaagcgagcagcagagctctgcctctgcccaagggctcctttattttccagctcctgttgattatttctcctctcgctgtttaggggacagtggtaaaagcaaaggaggcaagaaaaagggctcatccttccagacggtgtcggctctccaccgggtaagaagggcccaggggtgccaggacacctggtggaatggcccagcccagagacttctggctgcaccacctattctgatgcttgagtttgatgaggaaagaagctagggctacgtagtcgttttttagtgtgtagattccacaaaagcctgaactcacgtcacaaattatgtggcagcccctgtccctttgatgattctggtggagagtgtctggggaccagggtttaagggcctaagggatggtccttgtggctcctaactccccaccttcatctgcctccaggaaaatctcaacaagctaatgaccaacctgaggaccacccatcctcactttgtgcgttgcatcatccccaatgagcggaaggctccaggtgagccaggagaagaccttagtctggggaggacagctggcatccactttaccctaaggctgaccctttccccttccctcctgacacaggggtgatggacaaccccctggtcatgcaccagctgcgctgcaatggcgtgctggagggcatccgcatctgcaggaagggcttccccaaccgcatcctctacggggacttccggcagaggtgggtatgagggtgccccagagctcatagaacagggggagccaggctgccctgatgggaatgggatctgcaggtgaccctggaattctgtgggcagagcagatcactgcagagcatgggtgactctggacacttccctcctcaggtatcgcatcctgaacccagtggccatccctgagggacagttcattgatagcaggaaggggacagagaagctgctcagctctctggacattgatcacaaccagtacaagtttggccacaccaaggtgagtctagagccccactgggtggttgcagggcaggtggccatgttgagtggagcagagaggagtttaggaggcagaagcctaattctggcttccttatcaaccttatcaagggctgaaacccaggcttcattccggtcttgtttgtcaaatttttactcttacttctagaaggcatggggtgatgggtcacctgggagctcatccagggtcttccaccctggatactcccctctgaggctgcggcctgttgcatctaccccttgcctgcaggtgttcttcaaggcagggctgcttgggctgctggaggagatgcgggatgagaggctgagccgcatcatcacgcgcatgcaggcccaagcccggggccagctcatgcgcattgagttcaagaagatagtggaacgcaggtgagacaggaggaaaagggaggcatgcactagagatgtagaggcagatccgcaatgtcaactagtgtgggtcagaagacctgggttcagacctaccagctggcctgggcaagttactttaccacttcgaatctcattgcaaattcttcttcttcttcttcttcttctttttttttttttaaagaaacttctctataggaaaatgcaaattaagacaccaatgaaataccattttaaaacactagactttgcttgctcagatggtctacaaattttaaaaaatgaaagaaacaagtagataaaaataaaatgaaaggaaaaataatttttaaaagttttaaaaatcactagactgacaaaaattaagaagcctgacccactgcttacagatgtgtaaattagtgcaacttcctaggaaaacagtttatcactatcttttaaagttgaacagctgcaggccaggcgcggtggctcatgcctgaaatcccagcactttgggaggccgaggcgggtggatcacgaggtcaggagatcaaaaccatcctggctaacatggtgaaaccccatctctactaaaaaaatacaaaaaattagccgggtgtggtggcagatgcctgtagtcccagctactctggaggctgaggcaggagaatggcatgagcccgggaggcagagcttgcagtgagccaagatcgagccactgcactctagcctgggcgacagagcgagactccatctcaaaaaaaaaaaagttgaacagctgcatacttctccattccactcctgagtacattcctacagagaaactcttatacatgtacaccatgacatgaaaaataatcttttagcagcattggtcataatagcaaagatcttaaaacaacttgaatttccatccacaggggaatgggtaaatagtattacagtcattcagtggaatattataaaacagtgaaaagatgtgaactccaactacatgatacaatatgtttgaacattaaagcatattgttagtaaacaaaggcaaatcttggaaggatacatacagtatgatgcaatttttataaagctcataaataatcaaaaccagccattcattgtttaaagatacatacatatggctgggcacagtggcttatgcctgtaaccccagcactttgggaggctaaggcaggcggatcacctgaggtcaggagatggagaccagcctggccaacatggtgaaaccccgtctctactaaaactacaaaaattagctgggcatggtggcaggcacctgtaattccagctactcaggagctgaggcaggagaatcgcttgaatccgggtggcagaggttgcagtgagccgagattgtgccattgcactccagcctgggcaacaagagtgaaactccatctcaaaataaataaagtaaaataaaaataaagatacattcatatgtggttaaagtaatttttgaaaaagcaaggaaaggaaaaataagattcagagtggcggctgctcctggcggggtgacaggggtgtaggaaggaacgcacaggtagatcaatggctggtaacatttcagctcctgtttcagtggtaggttcatggatagtcattttgctttcatgctgcataacttacatacttattatagacattcttatatgtaaacccctacataatttttaacatatttgaagttcttatgagaatagaaaaaccaaacagagtagacattctataagtggtagtttccattaccactaatatcccagctgggaggatataaactgccctttcatcaaattgattaataaatatttatcaagcaactccatgttcagtgtagtgatgttggaggtgggtgtgcacaagaaggaagtctacgtgcctacgaacttgcttagtagggcccatgattgggaagctctcttttatagtgccccaccctgcctccacgtttccttgccagggatgccctgctggtaatccagtggaacattcgggccttcatgggggtcaagaattggccctggatgaagctctacttcaagatcaagccgctgctgaagagcgcagagacggagaaggagatggccaccatgaaggaagagttcgggcgcatcaaagagacgctggagaagtccgaggctcgccgcaaggagctggaggagaagatggtgtccctgctgcaggagaagaatgacctgcagctccaagtgcaggcggtgaggccacgtgattatctcttcagccctctcctcccctcccctagattatagcccatctcacaaccagggactgggagtctaggagtgccagctctttttaagaccctaggtctcctctctttaaccatcagcttcctccctgttctcttctcccaggaacaagacaacctcaatgatgctgaggagcgctgcgaccagctgatcaaaaacaagattcagctggaggccaaagtaaaggagatgaatgagaggctggaggatgaggaggagatgaacgcggagctcactgccaagaagcgcaagctggaagacgagtgctcagagctcaagaaggacattgatgacctggagctgacactggccaaggtggagaaggagaagcatgcaacagagaacaaggtgagggcagctccctctggcttcagcccaggtctcctcaagactcccagactagagtgttgtcctggtccttggcatggaggtccccatagatgtctccaggctggtgatctttgaccctaaaggggatgggtttttggtcggcaggtgaagaacctaacagaggagatggctgggctggatgaaatcatcgctaagctgaccaaggagaagaaagctctacaagaggcccatcagcaggccctggatgaccttcaggttgaggaagacaaggtcaacagcctgtccaagtctaaggtcaagctggagcagcaggtggatgatgtgagtagtaagaaccatgctcctgctctcagagcaagattttgcaggcaacaccaatggcccagaaagtcctgatccctagaattaacttctatggcccctgaagcttttttgctctctgtagttcctcactacagtaggtctctgaatcctttgtgcttgcaggatttctctgttggtttgacttccaatcccactggacttcaagtttagaaggaggcaaaagagcatacactatggatttcatgttttccacactttgcttattttcttccctccaacagctggagggatccctagagcaagagaagaaggtgcgcatggacctggagcgagcaaagcggaaactggagggcgacctgaagctgacccaggagagcatcatggacctggaaaatgataaactgcagctggaagaaaagcttaagaagtaggagactgtggtggccaggaggggctaatggaggtgtctggcctggtagatagagtgcagggtgctgcgcctccactggccacagttgccttgggtatgctgggaataaggtcaatcacagccctcttccgccactttctgggctggcgaggggagggggaggtgccgattctggcatactaaggccaagaagagaatgagccccagaggaaggaaggctacctgtcactcccccacccccacccttctcctgcaggaaggagtttgacattaatcagcagaacagtaagattgaggatgagcaggtgctggcccttcaactacagaagaaactgaaggaaaaccaggtgactttttttcccagtgcatgaaagtgggagctcaatagccctgaggtaactgaggctgcagcagctgcttagggttctacacaatatctggaactccaggcagcctcatagacccaaccatccctgacttacaggcgctcaggaacactagccttcccccatagagcaagaatacattacgttagcaaaactgtttgagaagggggactcatacctactaaagggcttctccttctgagatctgctctgcctcagggactttctactctaagacaaatgatagagctctattctcctctaacccttcctctggtagttcagccctctgaacgcagggtgaaaaaaaaaaaaggcttcaaggagcaccttcctgtgagctgctctgttcatattcttcccggtactaaccccagccactaacccaggctgagtccccatagggcactcatgataagagccaattccaacaactgtgagcaagtcacttaccctccctgatcctcagattctcttctcacctgtaaaatgagactgacaatacctaccacacaggaccagaggggataatgtatttgaaaccattttgtcaactaggaaattctatacaagtatcatattaatatagcccaatttagagaagtcagccagccactagcctaagaaggtattgttttgtcttctcaatggccttctcattcctctgcagctcaagatttagtgaacagccatagtctcccttagctttaatgaacctcaaaccctaatgtgcttttagtatcgggtttgtcagaagagacctggaagtccactgccatccccattatagagctacagaagctacatggccaggtctggacatagtgaccccaagggcaacaggaactcggctactggggcgggaccttgtcctctcactttggggcagactgtggctggtagaaagaggtagtctcccctctgcacttgaggcccatggcccaggctgcaagtaatgtatgaacacaattccactcctctggggctgcacagggactggcccgccttcattagtaatttgccctcccatcttcttggatgccccttctgggttttagctagaatatcgggccatcctcaggttcttctaccctaggtctgggcaacttgtttggcctcttggacacagaataacagtcctgttagtctcatcagctctcggcaataggctatggctcctccttcatccccaagatcttgctcagaagtcccaccttctccatcctgggagcagaggcatggtggtcctctctgctgcttgtaggacccatccatgaacagtccattaaagctgtccataacccgaggtgaagggatttccactgaacccccgttttgctcctggctagccagacaacagatcaaaatggtagatacgatattctcccaatttagtcaagaccaaggctaaggcccaaaaaatgaggtaagggcacttaaagaggataaggagatgaggtgaagaggagagtagcctgctagcactttcctggcctggaagggagcaatcatgttgaaacccagccctgggcataaacacagcaagcctgggagagcaaggaatatggttgattggactttgtggttaacttggagaattgcaaaggtatctgattgtttcgaggcatgttgtcacaaatatttgtaaaatacaagcactcattttcccgtcttatgaatagcgcaacagagcctagtgaatctggggactctgaacttcttgatctcacaggataccaggatcccccttcaaccacaggttctcaggatttggggctgcagatgctcacactgggtctgagatgcccttgggagcttcagccaaattcctattgatggcctatgcattataggatgtttagtagcatccctggcccctaccctctagatgccagtagcaagccccaccaagacatgacaatcagacattgccaactgttccctggggcacaaaattgcccctagttgagaaccactgcttgagaggaacctaagttcctggtagcttttcagagccggggggattccagtggaggggtccaggcggtgggtctgagccctttgtgtctgacccaggcacgcatcgaggagctggaggaggagctggaggccgagcgcaccgccagggctaaggtggagaagctgcgctcagacctgtctcgggagctggaggagatcagcgagcggctggaagaggccggcggggccacgtccgtgcagatcgagatgaacaagaagcgcgaggccgagttccagaagatgcggcgggacctggaggaggccacgctgcagcacgaggccactgccgcggccctgcgcaagaagcacgccgacagcgtggccgagctgggcgagcagatcgacaacctgcagcgggtgaagcagaagctggagaaggagaagagcgagttcaagctggagctggatgacgtcacctccaacatggagcagatcatcaaggccaaggcaggctctgctcggcctcccctcgccctctcccctgcacagcggagcctcccccatgccttctctctctgtctgccatctcccttgtcattctcattctcttcatcaccctttggtctctcttcctgtctcccctgcccctctctggctctcctcaccctctctatctcttcatgttcctcctttctttaattcaagtctctcttcagactgcgccctcccacaccttctgtgtccccctcctgccctctggcattccccatctctgaccctctcttccttcctctggtcgactcagcccctcccacactcacccttcctgtcttgcttcctgaaggcaaacctggagaaagtgtctcggacgctggaggaccaggccaatgagtaccgcgtgaagctagaagaggcccaacgctccctcaatgatttcaccacccagcgagccaagctgcagaccgagaatggtgggtgcccctaaccaaccccctgcctagggcaggacatgacttgtgaaatggcccacaagcccctcatttcacctccaggagagttggcccggcagctagaggaaaaggaggcgctaatctcgcagctgacccgggggaagctctcttatacccagcaaatggaggacctcaaaaggcagctggaggaggagggcaaggtgaggcccagtggggagggtgggcaggcttgatggcagccctggggcaattcatctcagtgccagaaatggagcctggagctggaaagagtcctctgcaagggaaagaccctccagtctaggttctgccctgcagctaagcgtcatttaatgcctcttttcttattcgtaaggggatggggtgagcagactgggaaactcctcaaacagtgaggtgccacatcagcccacatggtgaataaggctgggcttggttgaagtactacataagaagagaatctagagaatggggcacagggagtccctcccacctcctggtgcccccccccctccccaggcgaagaacgccctggcccatgcactgcagtcggcccggcatgactgcgacctgctgcgggagcagtacgaggaggagacagaggccaaggccgagctgcagcgcgtcctgtccaaggccaactcggaggtggcccagtggaggaccaagtatgagacggacgccattcagcggactgaggagctcgaagaggccaagtgagctccagatacccccttaacctgactctcagagaggaaggggcgagaggacctggggtggggacaggcaaagtggtcatgagacggaagtggaagagacaggaggaactcggagggcaacagaagtgcttggaagaaagcctgaactctttgctctgtgaactctggctggccctgacccacttcctgtgacgggcgagcttttggcccgggttatacctgatgctcacgtataagacgagcaaaaagcttgttggtcagaggagctaccgtcgatcagcctgtgtggggggtgagggcagggggcactgacacccagatgccactgcaggtagggaggacgcctgggcagcccgtgctggcggactctgttccaggcatgagcaggctcagctcctgctaggctggacttacggtgtctcaaggagatatagggagggggtggaaggaggtccacccaaggctccagtgttgcccagtagagtcacacacacaccctccaccctcacctgggcagaaagaagctggcccagcggctgcaggatgccgaggaggccgtggaggctgttaatgccaagtgctcctcactggagaagaccaagcaccggctacagaatgagatagaggacttgatggtggacgtagagcgctccaatgctgctgctgcagccctggacaagaagcagagaaactttgacaaggtggaccatgggcgggggccgcagccagcatgcagggcaagggggcatgaggggttcagtgagaggccaaaggcaacctccttggaggtggaggaggagggctaagcccaggctcgggaccagggacagatcttggacatgcggctgaggctgggggctggggcactgggaagcaggagggctggggagctaaggctggggggctgaagagtgagccttgtccccgggcagatcctggccgagtggaagcagaagtatgaggagtcgcagtctgagctggagtcctcacagaaggaggctcgctccctcagcacagagctcttcaagctcaagaacgcctacgaggagtccctggagcacctagagaccttcaagcgggagaacaagaaccttcagggtgtgctgggggtccaagaggccagagatgagttggtgggagggagggccatgcaggggcagggggaacataggctttgagctttctggccctctggtccccagaggaaatctcggaccttactgagcagctaggagaaggaggaaagaatgtgcatgagctggagaaggtccgcaaacagctggaggtggagaagctggagctgcagtcagccctggaggaggcagaggtgagggccgagaactccctgcaccccatccctgttctgccgctgtctcccacttctccctcacctgggggtgaccctgaccccaggacaaaatctattcattccatattctttgttcaacattatctacccactattcactacccatgactgcctccaaagccaaggtctgcacaaaggaaaatgtcagtctgattagaggccaaaggttttgtttcccaccaggttttaaaagttggaatctggccataataataaccacttagacagtgggtaggagtgtggggttccagagtcaaacaggcctgagttggaacacagcttgaggactttcactgcagcgttgggcaaaatctttaatctctctctgcctcagttttctcatctgtaaaatggaattaactgtacatacctcatatgattttacacatgattattataaagattaaatgaggtaacacatttaagcacttaatatatattagctattgttactcttcatttctaagcacctgggaatagccctgagttttctgggcttctaacttttctcaggaaagggtgagggacctggaaaacaagataaaattttgtatttgtggttataaaaattcctccattttctataatactttagacaggtcaggaatttatgcagtgttagtgctggagggtctggcaattgtgaggtccaaacccttttcttgacaggggaagcccagagagtccagcactttctccccaatagcaccgtggtgggcatggggtgcagatcccacctccccatctcttctcagctcttcttctctgggcgatagtcctggctgacaccgtgtatcttctcatcctccctctcaaccctgccctgtgccctgtctgcccgccctcgccccaccccttcccaggcctccctggagcacgaggagggcaagatcctccgggcccagctagagttcaaccagatcaaggcagagatcgagcggaagctggcagagaaggacgaggagatggaacaggccaagcgcaaccaccagcgggtggtggactcgctgcagacctccctggatgcagagacacgcagccgcaacgaggtcctgagggtgaagaagaagatggaaggagacctcaatgagatggagatccagctcagccacgccaaccgcatggctgccgaggcccagaagcaagtcaagagcctccagagcttgctgaaggtacatgggggcgggaggtcccctcaggggactggcctccatgtggcctggagaagcagtggtgtctggatacaggcaccagattcctcctgcccctgggttactgcagggacctctgacaggtgccctcagtgaagggcaccgaggctggcttctgctcacacccactctcctgatgctcaggacacccagatccagctggacgatgcggtccgtgccaacgacgacctgaaggagaacatcgccatcgtggagcggcgcaacaacctgctgcaggctgagctggaggagctgcgtgccgtggtggagcagacagagcggtcccggaagctggcggagcaggagctgattgagaccagcgagcgggtgcagctgctgcattcccaggtgagggggtcaggagccaccttgtggaaacctactgagtgcagagcccaggacatctagaaaagccagatgttctaagtgagcacatctagccagggtcacaaatcatttcctctcttaggccaactctcatctgtggtggctgcagaaccattatattaagaaagcggtctctacttagaagctaagagggtcatgattgattgctgatacctgccaaagccacaaatctgggagtagtggaatgtatcctgttatttgatattcttgatctgaaagacagcctccggcttgctctgtaaagatgagagtttgggagtttaaagaagcataactgcatctcttgcaaaccaagctggctagaacaccattttctgcaatcccacccacactgttttcagttatactctgcaatgagactttgtgctcaccttttgcagtgccctgtggagttttgttctttaatctagtatgtgtgagaatgacatcatccacttacctcatcccctcttccttaccccactacattcttggtatagctataaacatctctggaatattgtcctggtaaaaagttgtttccatcttccttggaatattgtcatgctcctacgtaaacatgttgctaaagagctccagggtaatactgcagaccttttgctatttgaagtcttttttcagagtttagtaatcttagatacaatgtctagaatgtatgcactttcataggaaaagggaaagcaggtacaaaacgatcaatagtctaaaagtgggcttgttgttttaaaaaaaaaatgaccacctttaattctttctggagaaagggtatgaaatcaggtaacaaagtgtagtatatatttgatcatttttctctctccatgtctagaacaccagcctcatcaaccagaagaagaagatggagtcggatctgacccagctccagtcggaagtggaggaggcagtgcaggagtgcagaaacgccgaggagaaggccaagaaggccatcacggatgtaagtgaccgcccaccttccgcctcccctaaagacagaaacaaggccttgggtccaggccaggccactgtgctgtaacaccaagccaactctgcagttctgtggatttgagggcctgatgggagaaaggagatccttggggggcaaaaggccccggcccctggcccatgttccttgccacctctctcctgcacacaggccgccatgatggcagaggagctgaagaaggagcaggacaccagcgcccacctggagcgcatgaagaagaacatggagcagaccattaaggacctgcagcaccggctggacgaggccgagcagatcgccctcaagggaggcaagaagcagctgcagaagctggaagcgcgggtgcgggagctggagggtgagctggaggccgagcagaagcgcaacgcagagtcggtgaagggcatgaggaagagcgagcggcgcatcaaggagctcacctaccaggtgcggcggacgccagacaccaggagtagatgtggaagtttcttctctggccccactgccccgccctcacagggctcctctcacctcctccttgagatgctgttggtagatttaacgttcttctcacgctctgcagtcagtttgacttgagtctatgagtttttccagcaaatgaagaatctacttctacttcctgaaaactcttctaactagtctttccccaggtttctttctttctttttttttttttttaataactctaagtgctaccatgaagacttcagaacagttcaaagaatccttccaccttcgactgtggggataagagtcaggggaggggaaaagacccggaaatcttccatagaacttctggcacacaaagagaaggccacagagaaagaggaccctagaatgctctaaaacctccacttgcatagctgagagctgtgcccttggcccgttattttcagtgtacctgggaagaaaaggccaaggagacgagggtgtcagtccatttgatagatggataccagaggcacaagaaagaggttacagatacagaaccacagagtgatttgtggacagaagtagaaatggcatcctggcacatacaatgataaagagataggaatgatcgagtgacgttggagccagtgatcccgatgcctgaattctggcccagtacaatatattagaatgtagaataatctggattatgataatacccccttctttctgcattctttttctggtcaagaactactggccaagagaacctatgtaagtccaggttggagctttatccaccatactggagctggaacagacctggtgcttttatattaccacattagggaattccattaggttctgagcccctccccctacttctagctttatgacttcagccttcattgctctgtggatccctgactgacaaccttgcattgcccctttgacctacgatagagtcagagaatcttccccaccacctctttgacctggatcattgcagggaggggcagcaaaggcaaggggagaagagtaaaatgatggaggagggaaaggtgattgcatttgctccccctccaaaccagcttctcccaccctcccacccccagacagaggaagacaaaaagaacctgctgcggctacaggacctggtggacaagctgcaactgaaggtcaaggcctacaagcgccaggccgaggaggcggtgagttcagagctttcttccctttctcatcaacacacctactatttgtgagaaccaatgaatatctcctacagaggggcctggacaaagagtttgctataaactttaactctcaaacatttgtttgacacatctggtatgctcagagctgtcaggtgttctgaattaacaaaggcaccacctacaagctgcttacaattcagataccataacccaacagaaggcagtgtagatgctagtgcaggacgtggggcagccgaagctgaaggcaggaaggtggcggtggaattgggcctagaaggggacccagctagccacagggcagtggggaagacatctgggtggatgtgagttgctgattagcatgcctgcacaggaagctggggtccgggacaggtgcagcaaaacaggattctgaaggggcccagatcgggcagcatgggatttgtctggggcagtggatggccgtgaaggactctgagtgctggacatgtttgagaagagtgcaaggcagttgcaggatacccttgggaaggctgttgcaggaatatgcatgaggtatgggtgcctcagggacagggagctggaacctcaggttgagaggctgagaatcccatagcccatctccagctcattcacccatccccactgtcccaccacaggaggagcaagccaacaccaacctgtccaagttccgcaaggtgcagcatgagctggatgaggcagaggagcgggcggacatcgctgagtcccaggtcaacaagcttcgagccaagagccgtgacattggtgccaaggtgggtccctcccctgggcttcactagtcacttccacattagcatgccccctgatatgggtgcccttcagagtgggcactgcttgccctatatgtaggcagttctgagggtcccatagcttacataacctgagaatccactctcctgctcaaaacagccccccactgactggaacttctgcagagatccccagttccatccccctaaaccacaagtgcctctaacgtgggaccacaggatccctggggccctgcctctccctccaagggcatctcccttaggcctctgaaagccccagggatttgtccccacacacttctccctcttgccagctgccccctcacacctcttattctttttgcagcaaaaaatgcacgatgaggagtgacactgcctcgggaacctcactcttgccaacctgtaataaatatgagtgccaaactctgcctgagcccatctgtccttcctgccagctgtccatcctggatcagggcagtagggggcctgagaggagggaggcccccagcccctgtatcagagctgccagagccaaggcatcccatatccacaaggaaggagaccgaggtgcagaggagtgaggtgttctgcctgacgtggacagctgtgagtcccagttctgctcagtcaaccacacaagggtggagagggagaaatttcaaaagtgaagaaaacaatggcatcaaaatggtgagccagtccaagatgctacgagatagaattttggtgccgaagttgaagccactctccacctaccccacccctgaggctgcaatgattaaaggtgtcctaggacacccattctttctgaaatgaattttccaccaatgccagaaaaggctcagagctggctgagaattaaggtatgggaaaggagatgggagagattccattctagtcagcccctaggaagtaactcccagggagccccctccctgtcttccccaggggtctccccctgcctcctatgattcagcacctcaccgtgagggcatcttgagactctggggccaatcaacactgagccc

SEQ ID NO: 14 - DNA, 23733 bp, Human
ttcctttgggaaaggtagggaggtgttcgtacgggagcagcctcggggacccctgcactgggtcagggcttatgaagctagaagcgtccctctgttccctttgtgagttggtgggttgttggtacatttggttggaagctgtgttgctggttagggagactcggttttgctccttgggttcgaggaaagctggagaatagaagccattgtttgccgtctgtcggctttgtcgaccacgctcaccccctcctgttcgtactttttaaagcagtgaggcgaggtagacagggtgtgtcacagtacagttaaaggggtgaagatctaaacgccaaaagagaagttaatcacaataagtgaggtttgggataaaaagttgggcttgcccctttcaaagtcccagaaagctgggaggtagatggagagggggccattgggaagtttttttggtgtagggagaggagtagaagataaagggtaagcagagtgttgggttctgggggtcttgtgaagttccttaaggaaggagggagtgtggccctgcagccctcccaaactgctccagcctatgctctccggcaccaggaagttccaaggttcccttcccctggtctccaaacttcaggtattcctctcccctcacaccccttcaacctcagctcttggcctctactccttactccactgttcctcctgtttcccccttccccttttcctggttctttatatttttgcaaagtgggatccgaacttgctagattttccaattctcccaagccagaccagagcagcctcttttaaaggatggagacttctgtggcagatgccgctgaaaatgtgggtgtaatgctgggacttagagtttgatgacagtttgactgagccctagatgcatgtgtttttcctgagagtgaggctcagagagcccatggacgtatgctgttgaaccacagcttgatatacctttttctccttctgttttgtcttagggggaagactttaactaggggcgcgcagatgtgtgaggccttttattgtgagagtggacagacatccgagatttcaggcaagttctgtggtggctgctttgggctcaaaacccacaaacagtcaaaacaaactatttcagtatgcttcttcactatagttcagatagaagaaaataaatcaaaattggggcatcgcttctactgattaaagggttaactgctaaagaatgtaggggaaacagattggggatattccagtactttgtttcaagccccaaagggtagattttgtatgcactgcagggcagagctgagtgaccctcagatcgccccaagaggttgagtggatcaattcctaaagaacggagattctcctgtcctagccccaggtccacctcggttgggagttcaggcctacctgatgcagctgcccgaggattaactcctattttcttgctaacagagccccatattcgagccccgtggaatcccgcggcccccagccagagccagcatgcagaacagtaagtgcctctggtctttctgggacttcgggctcggggtgcgcggacccgagggtcaggggaggacacagggactcgcgacgcccgcgctggcccggccgccgaccgactgaggcccggggacctgcggcggctgctccccgctccgcgcccggcagcccgggaggggagggcgtttgcttggctcttctcgatactggagaagcaggggctgggcccttaagaacagcccgcccgagttttcgaagctgcggtagagaaaccccatcccccccaaatcctgtaactcacaccccctctcgcccctgcccgggctctgaccccggagagaggggctgggctgatcagggcggggcgaagtcttctcctagttgagcgagaaggaggcccctttgggcttagccaagactgaaagtctccaccaacccggcggggttgggggcttctctccccaagtcactctcagggcagctcctcccctcctcaccccactacgggcctagaagggatggggagaggagcccccaggcctgcagcagggtaggggtggtaaactcgctgttacagggcgcgggagagagcacggtttactgggtctggtaaggaggtgcccaggaattggaaaatccctgccctggcaactgcaattgcttgggtcctgatagtcccaggcccagagcgcttttgatacttatggcccttgtacctccctgctttcctctgcccagaccccgtggggtcccacccaccttcctgttcgtggtgggtgctggtacgcggcagggctagtctagagctccgacctgggagcctggaggcccagcgaaaccaggcccggtttgaggttacggttgaggcacacggcgtcggggctcaactgaactcaaagtgtggaaaggcccgggtcttccagcagcctgccctggccgaaccacacaggcttaaggagggtccccagcaccttatccatctgttttggaaacgccggtcgccccctggtgcttccggggctggtaagcgcgtagctgaggaaagggcacaaaggtggcgagctttgcgggagtagttgtgcagaacctgccggaccccagggcttggccggtaggctcgccttcggcggctgggctctccccttggagctcagactccccagccgcaggctgtctctcgggcgggccccagccagggcgcgcagccctgagcgtttgtcgctgcggcccggctggcaggccccgaggggcgcggggtcgcgggccggccggcagggctttgtgccgctcgttcccgggtgtgcgcgaggcgcggagcatccaaattgacaccatatgttttcctattagttgcttcgcggtcgagttctaggcgcataatcatcgccagtgggcgagagcgccagcagtccctagggaagggacacaatgattgaggcttaacctctgaaggggaatttggagctgcgctttctctctgccatttcgatgctgggagtggcgctctggccctggcgtctcctgggcaagcaccagccggcggtatctgcggaggtggctggcacgttgttattttttgaaatgagtgaggagggaggtctagatttaggcggccttacgcgcccgccttggcattagcagactgggaattgccgtggctatgcccgaagtttggaaagtctctctcggtctctttctgggacagcctttctttttccgggaagcttcctgtgcctagaggtggggctctgtagctggaggggtagatggaacttgcgaagcaaaggaaggcaataaaaggaagttaggagaaaccggaaacgtgggccaggccttgctctgttggagaagcggtgtccccgcaaagtccctgcttgcgctggtcccggccggagcccagatcccccaaacgcctgtcacttctcatcgagttgaggctccggcccccacccgcgccttggtgagggccccccctcagccccaagccttcggctaccctgaaaacgcggctcccctcgaaggggaaacaagtgcagttcaatctcgtctgagtgatctacaaataaggacggaaagggtcgttttatcacggtcccgtttgtcgtgacgatgcaatttcccggagcggagcactgtcacaaagtgacaaggctgccacaagcgccccgactgatcttttcaattagccttccatgcatgatccggagcgacttccgcctatttccagaaattaagctcaaacttgacgtgcagctagttttattttaaagacaaatgtcagagaggctcatcatattttcccccctcttctatatttggagcttatttattgctaagaagctcaggctcctggcgtcaatttatcagtaggctccaaggagaagagaggagaggagaggagagctgaacagggagccacgtcttttcctgggagggctgctatctaagtcggggctgcaggttggagatttttaaggaagtggaaattggcaattggctttgtgtgtctgtggtttttggggagggggactacaaagaggggctaactccctctccctattctctaaggttggaccacagggatgaggttgtgagatacaaagataaaggagggatggggaacactatgatgtggtatttttcttttctgttttttctttttgataatatctatccttggctaaggggagggcggagttcagcggcggaaataaagcgagcagtggctggtgcgaaccgactcccggctctaagccttacttgcggtggccggacttgtctgtggctgaagccgagcccgggctctgactctcacgtctgcactggaggtgcggaaacctggactggggttcaccagccacatactggctgctctggttgttctctcctcttccttcttctattctaaccaaacaaaacccaactcgatgcttgtgccaggccttggccagtttggacggtgatggaaacatttctggattttagcgtctaagggagcactcaagggctgtaaggtttgctatcactgtcccaacactgcagagaccttgaaggttcagtgtgggatctgtagaacccatggtttgcggtgacactcagaggggatctttgggagatttatagagccggttcttagcgctttgtgggttcagaggctggctgcagtgtttatgaagaggggcagtgggctggggacactgctggggttatggctgtagtgaggtccatgtgtacttgttccttggcatgtgtctgactctgtgttgctgctgcagtacagtgggcaggggcacggttgcttggactgggctgcccgatgtctggcatggctggtggtcctgttgtcctttatttgatcgatagcagggaactgaccgccgaggttggcacaggttggcagggggatgaggatgcattgtggttgtctcctcctcctctccttcttcctcttccccttcctcctctcctttctgttcttgttctccctcatcttcctcttccttcttctccctcttcttcctcttcactctgctctcttctcttcttttcccctttcctctcctctccctttcctcaggtcacagcggagtgaatcagctcggtggtgtctttgtcaacgggcggccactgccggactccacccggcagaagattgtagagctagctcacagcggggcccggccgtgcgacatttcccgaattctgcaggtgatcctcccggcgccgccccactcgccgcccccgcggccctccactctcaacgccctctcttcatttcttactgtaaacgatgctaattatggacccccccaccctcacccaccccagtccccagtccccccacccactcccctgccttcccactttcccctctccttccaccatccttccctatctctttcaacctgggtcagttacataagataactcatctgcttcagaaaaatattgtgtgcggatttttttaaaaaaatctttctctttttatttggtaaagacattcattgtgggaacagtttatgaaccgtaataagctgagttatataaaccggcataatttcattctgctctccccagcccatgcttacctcagcttttgaggtatttgtttattcttcatgtttatgaataatatatattgattttaaaaggcaaatgctatttactcctccctaactcacatttactcaattgagtattttttaaagaagaagaagtaaaaaaatcagtttattttttacctttgttctttaaaacataacgccactttaagcaaggtcagcacaaaaataaatttatctacttcgttttgatgcatcttcaggcagtgtttaagaaaagttttttttttaaaaaaagcttttaaattcgttttttagttcaaattgtttgaaagtatcatcatatttgtagtttttagggctacaaatgtaattttaagaaaaaaagctctctacagtaagttctcataccattgaaggtatatttttgtgttatagacccatgcagatgcaaaagtccaagtgctggacaatcaaaacgtaagcttgtcattgtttaatgcatacttaaacaattttatttttgtcttgaaattattaataatgtggttttctgtccacttcccctatgcaggtgtccaacggatgtgtgagtaaaattctgggcaggtattacgagactggctccatcagacccagggcaatcggtggtagtaaaccgagagtagcgactccagaagttgtaagcaaaatagcccagtataagcgggagtgcccgtccatctttgcttgggaaatccgagacagattactgtccgagggggtctgtaccaacgataacataccaagcgtaagttcattgagaacatctgccctccctgccctaagcccaatgctctctcctctttacctcctcccaccctctctctccactgtctcttagtctgtgtcctctccctgctccacatttgtctcctttgtacctgggggaacagagaggaatgccctgacttttctttgactgtctggaaaatgggagtcaagtgtggggagtcattcacttcatttgcatgctgcaaaacagagggcggaggcaccagggaaaggcacttgaatgaagaaggaaaatgagaaccagattgtaacttcgtcctaatccacctgccagaactttccttcaggtgtcacacatccatttccatcctaatattaaacaatataatgaaagaaagctttacaacaagtctaaatagtttttattttcgggcagtcttttaacaaagcaaagcaaccgtgtgagttaggtcaccagagacaccaagcaatggtgaaggaccccctccgcccaattctctatccaactaaatttccatgcccaaagtgatagctatcattttttccacggtgtatctgcaaatccacccactgtcccggggtggctgggagctttttaacgggttgagagttgctttttaaggttgtgggtgagctgagatgggtgactgtgtcttcaggagacactaccatttggtttgattttggtttgatttgcaggtgtcatcaataaacagagttcttcgcaacctggctagcgaaaagcaacagatgggcgcagacggcatgtatgataaactaaggatgttgaacgggcagaccggaagctggggcacccgccctggttggtatccggggacttcggtgccagggcaacctacgcaaggtaaaacccaagcagccatccacgcagctctccatatgtgcatccctttgcctgtcccctactctcccaaccatttcctctcagggcttccatgcttggggaatgtcatgggtgagactgcatttgaaggcctgggacacatcgaccacattgtatgtaggtggtgtttgttgaaccattttgttggcctgggaatgtgagggttgtgtatgtcaggagcggtatgaaggtggctggtgggtgcgtgtgtgtgtttgtgggcagcactgtgtgcataagaacgagctgcgtggtgcactattcaaatttgacattagaatgcagggagagcccccttgtagaagtgtgacaagataacgcactgacagactgcgaggttaacataattgtatcctgttgctttttgctgtaattgacaaattatgtgactatgagtagggtgcacatgaaaaggtgagcagggagatgcagggcgagtcggggatggggcattggaagtggtggtctcccaactaaaaccaccccactatccttgcccctcccccgttcgcccctctgggtcccactttctcactctctgtgggtggcgactatgtggaagtggtgaggtgaagatactgtgagcaggacggcgggatgccgggagccgctctggtctgggaggagagatgggacctgaaacaccccaggttctgtgagaagggctggaggaagaagagcgggggatggggggggtggggcggaggggagggtcagttggctcccctccgctcccctccacaccccgaggtagcttggtcaagaataggaaacagtttactccgaagattaatcggtatttgttgtcctcgtgacaaggagataatatgcgggataatgggacgtggcgtctcactcccaggagcacaacggagccgaggggctcggggccaggggcggcgcgcgggactgcgaggaggctgccggcgcatccgtgagctctcggaccggctccggatgcccggcgcctccatggagtcgggcgagggaagggaaaatcggtaacagtatgcgaaatatctggtacaaaggatgcttctgtcactcgcaagaatttgttatgggaacaatcctgtcgctctgtaattgctcattagagaacgttttgtttctcattaaggcgacatgaataagcgtctagttgaaggagacagctgtagaaatgttccacaagagacctctggacacgattcggcaccaattgccaattagacatgtcagttttaagagcagaaaacaatataggacggacactgggaagatagggagcaaagcgctcgcttcttgtttcccagcgcggccgctcggccggcggaggcctcctgacgcgcggggcccgggctcccctgggcgaccccgcccgcacgggccccgaacccgccgcctccgcgagctcagagggcccccaggcccgctcccgcctctggtgagactagcgattgaccccaccgagtgtaggcaaccccatccctgcctgacttttgaaaccgtaggattcccacttgtagacactggacacacccaagtgacacccgaacttcgcactcacgagcgtccacccctccgcccccagcaatctgaggtcctggtgatccctcccctgacaagagtctggcccacttagtccgagaagtcttggggagggactcagggcacggtggcctaggcctgggagggctgagcccagagcctccactccgggctctccccggtgcgtgggctcccatgagcttggggcgcaggatacaccccccttccgcttcttggagttgggcagaagccgaggacagcagcttccaccagaggtggcgcccgattcgggcggattttcgtcgccggcagtctgagggcgggaagtgagagtcaaatcagctagggtccgcctgtgatggttggggccggaggtggagctagtccaggggcttttcactttaacgcgcctagttgctagaaaattctgggtcaactggcaatcaccacccccccacccgcaagtgaggtttttggggggtgattgtcacctcaggcacaggaccgtcgcccctagttgcgtggggaggacacgtgggccaaacgaagcacagagttgccggcgtgggggtagcgggcaccggtggtgagcttcgcttcacgttcccggggaatcctcagactttttggtgctaagagggtccccctccctccctagccccctttcccagcccaggaagcctttcttgggttttaaagagtccatactccaaaagcataaggcgggggttaggtctcagagggagacaaatatggtttccatctgatcaacgccatgcggcggtgaataaaatcgcgacgacgtgggctgacaacaacaagagacaactctatccagccccaattctccggcgatttggtggttttagggatcacggagacactttttcttatctcctcccctcaccccacccccaccccccataatacccaagccctctataggatttagtcagcctctctttcaacagatgctacaatgttttgatccgcgctccagagctgaaaaggtgccgcaaccgggttgctatcttttcttgcttgttttccgcctcactgattaagacactaagaaactaaggaatgattttatttcccagcaactctctctctgtctctctctctctctctctctctcacctccttccaggaaacaaatcctattcccatcgtcagatggtcctggggctgggataatgggaggcgctttcactcgctttctcacggattaggctggaaggtgaacggcacccactgaaggcccctgctttgcgcggctccgagggggcgccttttgaagaagatatcttaattgtccaccacttaggtttatcgtgggggtgggggagtcgagatccaacttctagttttattttgttaaaagctttaagagtggaaggcaaatccactaaagtggggggaaatgtacccattttatgtaagagcagccgctaggtcaccgcctggctgcaaacagttgccacttctaaagtaatgaactgtctccgtgccgctctccccgcggggtagagaagggatcctgcagcgacaggtttctttttgctgtggaattccaatccccgcttcccatcttttttttttttttttttttttccagatttaaaattgagctctactgtccctgctgacttttctctcttaagtgtcagttctggaggcagcacagggcctggcggcgatcgcgtgctgcctgtgtaaacccgtgtgtatgtttgtgtgagacagaacatggataagaatgtgaatctccatgttttaaaattaagaaaatgtcaaagaggcaaatgagagcagagcatgctatcggcggggttcttcggaggcagattcgggcaactttgtttaattggcgagatcgaatgtgccagaaaagggaccgagatggggcccctaggaaggcatgggcatgagtggccatggggagatgggcattgtgttctcctcagtgtcccccaccccataccagatgtgcacagatttttgtctgttttccaaaagcaataaccctccggcctttctagttggccaaaaggagctatttccagtcttccttcttcaccaaacccgaaaataaagcgaggggtgggggtggtcgcttcatttcttcccttgaaaaacgctttgaaaagtccccggaaacttggggcagtaaattagcacagacgcttgtgcccgcacacgtgagcggagcgcgtctccctcagctaagtagccctcctcgacccccacctttctgatggagtgcaaagacccagagtccagatggggctcagttactaatattctctggccctcatcctccttttcctctctctcccactcttgttcggccctcgtgtctctttttcctctcagcattcttttctgtccttttttaaaaatacctttctagcctctatgttttttgagccttcttttcccctccatcgccctctttttccctccatcgccctctgtctttcccctaacccaggccccccaatccttcccccttgcttccacccccaccgctggtttccatcctgcctcccctccatctcctctatgtaggaacccagccctggtccccgtccactctccctgcctccccccatgctgggccctggcccccccatccaccctccatccccccagccaagcgccctaaatagcacggaggcgcccgctcttcggacagtgattaatgatagcagagcagaggggttaacacacttcactgaaaagtctgttgactgggcttcttgtaacacaatgtggcccgctgcacgcctcaagagaatccttttgttgtccgcgctcattgtagcctcaaaattctgcccacgaaagtttgccaacgctcctgccccaggagtttaatagtttcccttactcgcggggcattgtgcagcgctgaaaagcagcccctcgctattcaagtgttggtggtcatctcaatagatctccaagggcccatatggtggccagtgccgatgaatccgcctgtttaaatgggggagaaagttggggttttaaaacatttcaaagttcctgaaaagatcccactagatcctgtcacaattccctgaactctttgaaggcgcagcctattgtctcctggttataaataatattcctggccaagtcgattcccaccaaggcgctcctaggggcccctccaccccgcctctggccaagttttgaggatagggaggtgggtagcccatgctggtatcccttgggggtcatttcaggaccccagacccaggacccagcctgtagtggccctggaggcccagtcagagtttaggcaatcctgcttcccttcactgtggccttacaggcaaggtgcaagccgggagccagctagcccaagtgcacatcttgccctccaggcagcaagggaaaaccataaaactttccccctgtataatgatagaagttacattcaaagtggtggaaatgccctaattaaaaatgtaccacttaaatgatatgccaaagattcagctgcagcatagaatatttagctagttagtgaactctctactatttcttttttaaaattacacgttaaaaatttaaaagaaatcttacttttctctggtgcaacacattacaaagaatggacagtccttttatctaaatataaaattccattttcagcaattatagcctgttcttggtgatgatataattacagctgtgctcgtaataggtgtcaaggcgaagcgcactcatacaatagttgaataaaactgcagaacaatgcgagcacttctaaattcacaacctttaaatgaaattgactgtgcagaattcaaataaaaactagataaatattttttaaaaaagattacaagcttggtttggtttcttaatagcattttctacaaacctatcaacatctaattgattagataggaattactgattatagatcaactgaaatcttgaacatcactcttctattttcccaacacagccataggtaaagagattctgtagggagtggagtgaggcatttggggagttggggttacttataaaagatcattttaattggaaacttcagtgcttattttttcattcaagaaatgccacttagtgtgtgtattataaagtctcatcttgataaaaacaaagaaaatggtggtcaggtaactaacatcgcaaatgtatttttttaaaagaaggctgacagttaccttgggaatgttttggtgaggctgtcgggatataatgctcttggagtttaagactacaccaggccccttttggaggctccaagttaatccaaatttctcttaccatcctattctttttgttccagatggctgccagcaacaggaaggagggggagagaataccaactccatcagttccaacggagaagattcagatgaggctcaaatgcgacttcagctgaagcggaagctgcaaagaaatagaacatcctttacccaagagcaaattgaggccctggagaaaggtgatagagtttttcaaagtagagaagcagtaaatcaaagtaaatgccacatcttcagtacaaagagctaaatttagccagggccctttgcatagaagaatgaaaagatttccttttttctgtctttttatttctctgggcatcttttcagtgtgtgtgtgtgtgtgtgtgtgtgtgtgtgtgtgtgtgtgtgtgtgtgtgtgtgtgtggtgtgtgtgtgtgtgtttcttcttttcatctaccagtaattcaaagactaaatgtctgacttataaggaaaaatgatgatttggctatttcaggccacagaaaggtcactgaatgccattccaaagaaaatttaacttggttctggtgggaaagttcttccaagtacagtcaacactagaagcattttaaagggaattggttggaggtaatgggagtggggaggtgggaaccagtttgatgcacagtttggtcaacatattttgtgtagttctggcacaatatggaaaatcaacttactctttcagagtttgagagaacccattatccagatgtgtttgcccgagaaagactagcagccaaaatagatctacctgaagcaagaatacaggtaccgagagactgtgcagtttcacactttgtgattcataccatttgtctttcctagagacagaggtgcttgtacagagtactatttatttataggactaatataataaaaaggttcagtctgctaaatgctctgctgccatgggcgtggggagggcagcagtggaggtgccaaggtggggctgggctcgacgtagacacagtgctaacctgtcccacctgatttccaggtatggttttctaatcgaagggccaaatggagaagagaagaaaaactgaggaatcagagaagacaggccagcaacacacctagtcatattcctatcagcagtagtttcagcaccagtgtctaccaaccaattccacaacccaccacaccgggtaatttgaaatactaatactacgaatcaatgtctttaaacctgtttgctccgggctctgactctcactctgactactgtcatttctcttgccctcagtttcctccttcacatctggctccatgttgggccgaacagacacagccctcacaaacacctacagcgctctgccgcctatgcccagcttcaccatggcaaataacctgcctatgcaagtaagtgcggctggtggtggcctgcataacccaggccccagagaagtgaggagtggctcagggcctgcggacctcattggctgtgtctgcacccttgagagcttttcgcactacagtgattggcttgaccagtcaagtcggagacagtcaatcccatcacttttaagtgattgactcattaattcatgccctaaaaaaatgagtaataaaaatctgtccagttttgtcaggttgatctgccttttattatactgttaccttgataatgttgggtggtggtggggcatgttttgggtaccagggagccttgcaccagaaagtggaaataatgctggcacattatcagatagcagattagtagtttaaaatttgggtttatattaatgtgtttgtatgctaaatatagaatctgtgcacgcatttggggcattactttgggtatatgtgataaactagtgagaaagaaaaaaggatcagaaatgggattcatatttacatggtgagatatacataatataatgagaatgctagttttctgtctgtatctacaataagaaaaggcatagcaggtatttgctggaaatttagtgtgtctttgctgtgaatggtgtgacgagtttgtggccctcctagctgcctgggaagcttgatgctattcacttggtatgacagcctgcctctcctcttagttctgtcccaaatatctattagcccctacatttagaggtcctgcactaggttcaccctttatgatgtaagttggataaggcagatggtttgtactagacctttgttgctggatggattcttgataggaaaaatgtctgtcttctggtaggcctttcccagtggttttcctagaactcctgtttgtgcaacaattagagatattagatggtacgatattggccagcatgagcctctgctggaaacagttctggggctacactgattgtttattctccattgaacattttttgctggatttcaaatccaaataacagcaaaataaatgtttcacagtcttcagactaatataggagcagctagataagcaacttcagaggaattattcacatgtttatttttattgcatctggatattgttggccatagtgcaattgatgtaaattaagggattaacagcccattagttggtgttgctataactgcgttggaattttccagaagtcaggttgcctagaggaactcattgcaggaattagaaacaaatgcaagctgaaattctggcaggccctcaaggcctgtttgcctctttgaacttgatgttagcattcatcatctgactttaataaggccacagagtgtctcgttcagtttcatgtattataacaacatccaggtttctgtgaagatagcaaaatgtgtatgtgagaaaataataagacgaacaagtagatgctgcaattatattagggctgtttccacatacagagcggtatggggaatcaatctatttcaaacactgacttttaaaaattacataatttgtataattcaaaaagtacatgcattcattaagcataaagaaaatcaaaatgatcaataactttactcttcagagaaaactactctttgaattttggagtgggtgagcccgattgtctatccatttattcattctcttgaccaaaatcatcattttacaaatggtgggtgtcttcctctggaccttctctgatatgcttccctctctgagcatatggattttggaaattaaacatttctccagtttgcagagaagagaaatgatagtatactgtactatcatctgacctgcttgttcccgacacacttcttttaattcatcccaagtttgctgccatggcatagtaccatgagagctcatgaggcgttttgttaggagaaaggtttacctcctcagtgctgccattccgaacagttcgagggtagcaacagttttctagttataagtcagtctgggcttttgggtctgttaggaagtcatggttaattctcaggatggaggtcgttatatttactaacacttctgatcactttaacttggggtcattacagatctgcttcttcaaagaatctttaatcccatcagtgaaaggttcccaaggtccctgaaccatactttactgagagctcctcccactgctctctgtcccaaagcttgagatatgggctctgggggtcatagggttcccaaataaatccagatttgcagggagaggggatgtgttttgatgaaggtcctcatgctataggttcttcaaagatgctagcagaggttagagacaaaaatcctattaatttatggatagtggcaaccatctagctggacagttgtcagaacctaaagtgctttagaggcttgatacataggcagctttcttctagctgtggccagtggaaggactagctcgaggcccaatcttagatttatcatatggaattccagtacttcacgtgaaggcatctttaatgatcagacttgttggcagagttcctcgggaggagggagcctggggctgtggctgtgtgatgtgttcctcagtaaccacaggtttgcctctctcctcacagcccccagtccccagccagacctcctcatactcctgcatgctgcccaccagcccttcggtgaatgggcggagttatgatacctacacccccccacatatgcagacacacatgaacagtcagccaatgggcacctcgggcaccacttcaacaggtgagccactgctttctgcaggctgcacagaggcgatctctcttcactagaagtttacccaaacagaatctcctggtcttatgggagggcgtgtttaactccttgctttccttgtccctgggggatggggattgaaaagggaaattcagttaagctaattagtaactttacaccatatagacaaaaactaaaattgtttttcctgaatttggtcacaaaagttgtgtatgaagacaaggcctgagactgcaagttttctgaggacagattattagacgaagctcagtagggggcccactgagctgtaggtgcgtgcttgttgaaatgcttcttgccctcatagctcctctagaccttttgctggaaataaaaagtgacacattggttttccagagacagctttattgtaaaagttccaaacatgcaaacaaacagaggattttttttttcttttcctttggattggggtggggggtacttgggatccaataggtatatatacatatattgtctagtttctgaaggtgctacttttatttgtaacaattgaagtgattttaatacagtaaaaaatgttagaaagtattagtttttttttttttttttttttttgtaaacctataaatttgtattccatgtctgtttctcaaagggaatatctacatggctatttctttcatccacttctaggactcatttcccctggtgtgtcagttccagttcaagttcccggaagtgaacctgatatgtctcaatactggccaagattacagtaaaaaaaaaaaaaaaaaaaaaaaggaaaggaaatattgtgttaattcagtcagtgactatggggacacaacagttgagctttcaggaaagaaagaaaaatggctgttagagccgcttcagttctacaattgtgtcctgtattgtaccactggggaaggaatggacttgaaacaaggacctttgtatacagaaggcacgatatcagttggaacaaatcttcattttggtatccaaacttttattcattttggtgtattatttgtaaatgggcatttgtatgttataatgaaaaaaagaacaatgtagactggatggatgtttgatctgtgttggtcatgaagttgttttttttttttttaaaaagaaaaccatgatcaacaagctttgccacgaatttaagagttttatcaagatatatcgaatacttctacccatctgttcatagtttatggactgatgttccaagtttgtatcattcctttgcatataattaaacctggaacaacatgcactagatttatgtcagaaatatctgttggttttccaaaggttgttaacagatgaagtttatgtgcaaaaaagggtaagatataaattcaaggaagaaaaaaagttgatagctaaaaggtagagtgtgtcttcgatataatccaatttgttttatgtcaaaatgtaagtatttgtcttccctagaaatcctcagaatgatttctataataaagttaatttcatttatatttgacaagaatatagatgttttatacacattttcatgcaatcatacgtttcttttttggccagcaaaagttaattgttcttagatatagttgtattactgttcacggtccaatcattttgtgcatctagagttcattcctaatcaattaaaagtgcttgcaagagttttaaacttaagtgttttgaagttgttcacaactacatatcaaaattaaccattgttgattgtaaaaaaccatgccaaagcctttgtatttcctttattatacagttttctttttaaccttatagtgtggtgttacaaattttatttccatgttagatcaacattctaaaccaatggttactttcacacacactctgttttacatcctgatgatccttaaaaaataatccttatagataccataaatcaaaaacgtgttagaaaaaaattccacttacagcagggtgtagatctgtgcccatttatacccacaacatatatacaaaatggtaacatttcccagttagccatttaattctaaagctcaaagtctagaaataatttaaaaatgcaacaagcgattagctaggaattgttttttgaattaggactggcattttcaatctgggcagatttccattgtcagcctatttcaacaatgatttcactgaagtatattcaaaagtagatttcttaaaggagactttctgaaagctgttgcctttttcaaataggccctctcccttttctgtctccctcccctttgcacaagaggcatcatttcccattgaaccactacagctgttcccatttgaatcttgctttctgtgcggttgtggatggttggagggtggaggggggatgttgcatgtcaaggaataatgagcacagacacatcaacagacaacaacaaagcagactgtgactggccggtgggaattaaaggccttcagtcattggcagcttaagccaaacattcccaaatctatgaagcagggcccattgttggtcagttgttatttgcaatgaagcacagttctgatcatgtttaaagtggaggcacgcagggcaggagtgcttgagcccaagcaaaggatggaaaaaaataagcctttgttgggtaaaaaaggactgtctgagactttcatttgttctgtgcaacatataagtcaatacagataagtcttcctctgcaaacttcactaaaaagcctgggggttctggcagtctagattaaaatgcttgcacatgcagaaacctctggggacaaagacacacttccactgaattatactctgctttaaaaaaatccccaaaagcaaatgatcagaaatgtagaaattaatggaaggatttaaacatgaccttctcgttcaatatctactgttttttagttaaggaattacttgtgaacagataattgagattcattgctccggcatgaaatatactaataattttattccaccagagttgctgcacatttggagacaccttcctaagttgcagtttttgtatgtgtgcatgtagttttgttcagtgtcagcctgcactgcacagcagcacatttctgcaggggagtgagcacacatacgcactgttggtacaattgccggtgcagacatttctacctcctgacattttgcagcctacattccctgagggctgtgtgctgagggaactgtcagagaagggctatgtgggagtgcatgccacagctgctggctggcttacttcttccttctcgctggctgtaatttccaccacggtcaggcagccagttccggcccacggttctgttgtgtagacagcagagactttggagacccggatgtcgcacgccaggtgcaagaggtgggaatgggagaaaaggagtgacgtgggagcggagggtctgtatgtgtgcacttgggcacgtatatgtgtgctctgaaggtcaggattgccagggcaaagtagcacagtctggtatagtctgaagaagcggctgctcagctgcagaagccctctggtccggcaggatgggaacggctgccttgccttctgcccacaccctagggacatgagctgtccttccaaacagagctccaggcactctcttggggacagcatggcaggctctgtgtggtagcagtgcctgggagttggccttttactcattgttgaaataatttttgtttattatttatttaacgatacatatatttatatatttatcaatggggtatctgcagggatgttttgacaccatcttccaggatggagattatttgtgaagacttcagtagaatcccaggactaaacgtctaaattttttctccaaacttgactgacttgggaaaaccaggtgaatagaataagagctgaatgttttaagtaataaacgttcaaactgctctaagtaaaaaaatgcattttactgcaatgaatttctagaatatttttcccccaaagctatgcctcctaacccttaaatggtgaacaactggtttcttgctacagctcactgccatttcttcttactatcatcactaggtttcctaagattcactcatacagtattatttgaagattcagctttgttctgtgaatgtcatcttaggattgtgtctatattcttttgcttatttctttttactctgggcctctcatactagtaagattttaaaaagccttttcttctctgtatgtttggctcaccaaggcgaaatatatattcttctctttttcatttctcaagaataaacctcatctgcttttttgtttttctgtgttttggcttggtactgaatgactcaactgctcggttttaaagttcaaagtgtaagtacttagggttagtactgcttatttcaataatgttgacggtgactatctttggaaagcagtaacatgctgtcttagaaatgacattaataatgggcttaaacaaatgaataggggggtccccccactctccttttgtatgcctatgtgtgtctgatttgttaaaagatggacagggaattgattgcagagtgtcgcttccttctaaagtagttttattttgtctactgttagtatttaaagatcctggaggtggacataaggaataaatggaagagaaaagtagatattgtatggtggctactaaaaggaaattcaaaaagtcttagaacccgagcacctgagcaaactgcagtagtcaaaatatttatctcatgttaaagaaaggcaaatctagtgtaagaaatgagtaccatatagggttttgaagttcatatactagaaacacttaaaagatatcatttcagatattacgtttggcattgttcttaagtatttatatctttgagtcaagctgataattaaaaaaaatctgttaatggagtgtatatttcataatgtatcaaaatggtgtctatacctaaggtagcattattgaagagagatatgtttatgtagtaagttattaacataatgagtaacaaataatgtttccagaagaaaggaaaacacattttcagagtgcgtttttatcagaggaagacaaaaatacacacccctctccagtagcttatttttacaaagccggcccagtgaattagaaaaacaaagcacttggatatgatttttggaaagcccaggtacacttattattcaaaatgcacttttactgagtttgaaaagtttcttttatatttaaaataagggttcaaatatgcatattcaatttttatagtagttatctatttgcaaagcatatattaactagtaattggctgttaattttatagacatggtagccagggaagtatatcaatgacctattaagtattttgacaagcaatttacatatctgatgacctcgtatctctttttcagcaagtcaaatgctatgtaattgttccattgtgtgttgtataaaatgaatcaacacggtaagaaaaaggttagagttattaaaataataaactgactaaaatactcatttgaatttattcagaatgttcataatgctttcaaaggacatagcagagcttttgtggagtatccgcacaacattatttattatctatggactaaatcaattttttgaagttgctttaaaatttaaaagcacctttgcttaatataaagccctttaattttaactgacagatcaattctgaaactttattttgaaaagaaaatggggaagaatctgtgtctttagaattaaaagaaatgaaaaaaataaacccgacattctaaaaaaatagaataagaaacctgatttttagtactaatgaaatagcgggtgacaaaatagttgtctttttgattttgatcacaaaaaataaactggtagtgacaggatatgatggagagatttgacatcctggcaaatcactgtcattgattcaattattctaattctgaataaaagctgtatacagtatgtgtttatgctacagtgggtttttttaagtgactgacattcatcatattggttagacagttttaaaaacctagtctttgttttctacaatgttgtcaagaacaaataaagtataatttgtggtatattaaaagcaagctgcttaaaaatgctagttataactgcttcaaaatattaaatacatttgaaaatgtattttggaaattcagtttctcccaatggatgttaaacaccttttaaaaaatcaagactcttaaatatgcaagttacttttcaactttcattttttatccattatctgtcaaaagctttgagaatatagaattgtaattaaaacacctaatgtttcatatgaaaactggttcgatatgctataccccccaaagacatgtttacatggttagaaatttacacactcaaccaatgttcattattaacaaaatatttatgtgatgcaatggaaatctgagttagtttcattttttcactttgtctcagacctatgttctgtaaaatctctcaacaagcttcagtatatgtttttctcctggtatcctagcattaatgtagctgtcagtttgaatttcaatcctgaatgatgcctgttgacata

SEQ ID NO: 15 - DNA, 5374 bp, Human
cacaggctaacccagaacagaagacaatttttgaacccaagagctgctggggaaataaaagtatacgattgctggagtttctaatttctattaagcagtccctctggaagacagagaggacagagacgctcttgaagtcaactccatatgccccatcattgattcctggattcttctctcctcacccctccctccccacctcctgccctgtttgttttagttacgaaatgctgtgggcacctcggttgtgactgaaaagtaaccttgaaacacgccggcctgaatatcagagacaaatctcagcctcccaaccgtcggccgctgctagaggggctgcttgcgccaggcgccggccgccccactgcgggtccctggcggccggtgtctgaggagtcggagagccgaggcggccagaccgtgcgccccgcgcttctcccgaggccgttccgggtctgaactgtaacagggaggggcctcgcaggagcagcagcgggcgagttaaaggtgtgtacgtagtttttctaaataggacagcgctttgcaaattggctgtcatggacttgctgttttgacagagaatgagcactgagagcgaagaaacccggcataaataaatccggctttcatagggatctgccgggcactgaggctggacgcgccctccgacaggcgcaccgggcgcccggcgcgatgagacggggcgggggctggaggccggagccgccccagagggtggtttcctcccaggtccctccttcctcaggggactcgctgtggacccgggaggaaagggggctcgaccagggatcccgcgtgcccgatcgcccgcccagcccgctcccctggcccgcccaggagtgcggggcgccgcggcggtggggcggacggcaggcgctgaggggcaggtgcggagcgccggctgcggctacctctcacctaggtgtgagctgattattcaaatgggctgccccgggtctggggattggaggcccgcgccagcgcgccgcgctatatcaccagcctcccacgtcactgcggcacttgtccgctccgcggtccacacctcctcctcctcctcctcctcctcctcctcctcctcctcctccaccaccaccaccgcctcctcctcctccttcctcctcctcctccccacccccccactagcccccgcgccgcgcgcttcccgccgcctcggggcagctcggcactgccaacctcagccgccacccggcagcccgtgagcgcggcggcggcgggtgctccctaccgcggggcgctggcctgggcctcctccgctcctcgcccccccccacctcccgcccacttccaactaccgcctccggcctgcccagggagagagagggagtggagcccagggagagggagcgcgagagagggagggaggaggggacggtgctttggctgacttttttttaaaagagggtgggggtggggggtgattgctggtcgtttgttgtggctgttaaattttaaactgccatgcactcggcttccagtatgctgggagcggtgaagatggaagggcacgagccgtccgactggagcagctactatgcagagcccgaggtaagcgctcgtcttttccagggggaagtggagcggcggcgctcgctccttccccaacctcaggaccgcttccctcgctggcacccccccaccccgccccacaaccccagcctttctgggcagccgccttttccgccctccttggaatcaaatgggtctcttttttatacgacacactgttagccttgagataatattaactttgtgatcaaatattgacttgcggcgcctccaaatcctcttcgtggccgagccacgcactatcctaacagagttatgtttggcagcgcgcggctggggaggggtgggaggtcggccggcgagggggtggggagctgaggaggagaagatgggtaggagttgggggctgaagtggaggcagagtcaaagactagtggacaaagagaaagaaagtttttgcctgcaaagctcagccgcgtgtggttcaggtctcggttctttccctattgccccgttcagtgcctccagccgcccccgcactccgcacaggcactgccttgcagtttccctgggacaagggagggggtccctggagggagaccggacagagggggcccgggacagtcttcgctggaggcagcccgaggcgccccgcgcgttgtcccgcaggttgcttgctgcgaccggaggtggcgtccggggacttcgggcctcggcgccagctcagtatgctggtgggagagtttggggagactctggggtaggggaatgtatttggggtgctggcttgggagtactccatgggacccctgttctagaatctgggcgaggtggagaagggctaggaacgggccacatgcccaagcagcaatccgctcgccaccttcccaagggcgatcgatcatgactctccctgaatgaaacagactcggagtccggagactgggccatcggggacgaaagggctccccggaggcctccccggacgcggaggcctgggcggtgggtgggaggtctgggcaccctccagccgcggtgctaacgctgtcgcctccctcccggggctctgtccgcagggctactcctccgtgagcaacatgaacgccggcctggggatgaacggcatgaacacgtacatgagcatgtcggcggccgccatgggcagcggctcgggcaacatgagcgcgggctccatgaacatgtcgtcgtacgtgggcgctggcatgagcccgtccctggcggggatgtcccccggcgcgggcgccatggcgggcatgggcggctcggccggggcggccggcgtggcgggcatggggccgcacttgagtcccagcctgagcccgctcggggggcaggcggccggggccatgggcggcctggccccctacgccaacatgaactccatgagccccatgtacgggcaggcgggcctgagccgcgcccgcgaccccaagacctacaggcgcagctacacgcacgcaaagccgccctactcgtacatctcgctcatcaccatggccatccagcagagccccaacaagatgctgacgctgagcgagatctaccagtggatcatggacctcttccccttctaccggcagaaccagcagcgctggcagaactccatccgccactcgctctccttcaacgactgtttcctgaaggtgccccgctcgcccgacaagcccggcaagggctccttctggaccctgcaccctgactcgggcaacatgttcgagaacggctgctacctgcgccgccagaagcgcttcaagtgcgagaagcagctggcgctgaaggaggccgcaggcgccgccggcagcggcaagaaggcggccgccggagcccaggcctcacaggctcaactcggggaggccgccgggccggcctccgagactccggcgggcaccgagtcgcctcactcgagcgcctccccgtgccaggagcacaagcgagggggcctgggagagctgaaggggacgccggctgcggcgctgagccccccagagccggcgccctctcccgggcagcagcagcaggccgcggcccacctgctgggcccgccccaccacccgggcctgccgcctgaggcccacctgaagccggaacaccactacgccttcaaccacccgttctccatcaacaacctcatgtcctcggagcagcagcaccaccacagccaccaccaccaccaaccccacaaaatggacctcaaggcctacgaacaggtgatgcactaccccggctacggttcccccatgcctggcagcttggccatgggcccggtcacgaacaaaacgggcctggacgcctcgcccctggccgcagatacctcctactaccagggggtgtactcccggcccattatgaactcctcttaagaagacgacggcttcaggcccggctaactctggcaccccggatcgaggacaagtgagagagcaagtgggggtcgagactttggggagacggtgttgcagagacgcaagggagaagaaatccataacacccccaccccaacacccccaagacagcagtcttcttcacccgctgcagccgttccgtcccaaacagagggccacacagataccccacgttctatataaggaggaaaacgggaaagaatataaagttaaaaaaaagcctccggtttccactactgtgtagactcctgcttcttcaagcacctgcagattctgatttttttgttgttgttgttctcctccattgctgttgttgcagggaagtcttacttaaaaaaaaaaaaaaattttgtgagtgactcggtgtaaaaccatgtagttttaacagaaccagagggttgtactattgtttaaaaacaggaaaaaaaataatgtaagggtctgttgtaaatgaccaagaaaaagaaaaaaaaagcattcccaatcttgacacggtgaaatccaggtctcgggtccgattaatttatggtttctgcgtgctttatttatggcttataaatgtgtattctggctgcaagggccagagttccacaaatctatattaaagtgttatacccggttttatcccttgaatcttttcttccagatttttcttttctttacttggcttacaaaatatacaggcttggaaattatttcaagaaggagggagggataccctgtctggttgcaggttgtattttattttggcccagggagtgttgctgttttcccaacattttattaataaaattttcagacataccaaaattgaatgaattttacagtaggcacacagggacctgctcccgagattctgcaattaacatttcattatacttgctttatcacatacttgtccatctatcttcacctccactggtcaatccatcttatttctctaaatccacttcaaatttgcagataccagtacacatccccctaaacactaaagcaagcacattattaaatggaacttgtatggtttatggttactttttgaatttgggggttaactttacacacaatgaaatacacagatcccaggaagaccattccagcaggtttatttttaaagccagtagaagatcactctccacatatcacaattttccaccttggctgtttgaatgtgccctgttgttgtggtctcttgggccccacagcttgcttctcttgggggaagcctcaatttcacatgtttttgctgtacttctgatcttgggcctcccttcaggtcaatgagcctggatcaaacttgcaaatttgtggtgcagcactttgcctgttcaccactgtgaacagtggtggaattgggactctgcctggatcttccagcctcctctgtacacagggtgccaccc

SEQ ID NO: 16 - DNA, 4854 bp, Human
atgcaggaatggctgttagttgccctcaaaaaccaacacaaatacacaaacacaacagcctggcttagtgattattaagagctgcaagtctgaaggcggactgctgggtgtgaattccaccttctcaacgctgtagtctccagcaagttccttaacttctctgcctccgtttcctttcctgtaagatagagtctacctcagggttaatatgaggatatgcttctttgctaatgctggagggcgctaggaatagcagtggcaggctgtgtcatttctcagtgttgtataacggcttgttttaaaagtcccactgaaaactttttttttttccagatcgaaacacaagtttaatagtcattcagatttcattccagtctaaagaaacttatagaaatctaattatctgccagaataaccgctttaaactgactgtaagaaccacagttactttgcagctaaaacagattgttctcttcccccaaacaaactcggacatttagacaaatattgctgctgtctttacattttagaaatcagtattaaggctcacctgttactgaacacatacgagaaacagttttgttatgcgtatcttatatacatcatgtatacattttcgtactttcacatgatgtgtataataagatacacataaaaactggttggcttgtcatgagtaaatgctttattctttagagtgaaggaatattggatacagaacgtcgttccatatttaatcttgctttagaaaattaggatttatcttggacacagcattttgaatataacacaggcaagttgagtcctgggggaaaaattgtatttttaaatttattatcaacggtgtctttcgcatttgagaaaacacatttgaagatgcccatgcagttccttggaagtaaactaggtcacccaccactgaaacaccctcggcttctgcaaaaagatgtgctttaaagagaatagaatggacgctcggtatgttcatctaaacgaccttgggcaagtacgtcgattccaaggtacaatcagccctcccagacggcttttcgagtctccctaaccccggtgggagaggacgcggcgccagagcccagctccggctagttttcccgggggcaggtgtagccttgggcgcggggccgggggaggggcaaggggcgggcgtggggttggactgggacgtgggactcggaccacggcctgggcgtgggcctaacgacgcgggaccggcccgccctcgccgctccattggccacatctgtgcagaaaaggccccgcggcccaggggcgcccgcagtgtcactaggccggctgggggccctgggtacgctgtagaccagaccgcgacaggccagaacacgggcggcggcttcgggccgggagacccgcgcagccctcggggcatctcagtgcctcactccccaccccctcccccgggtcgggggaggcggcgcgtccggcggagggttgaggggagcggggcaggcctggagcgccatgagcagcccggatgcgggatacgccagtgacgaccagagccagacccagagcgcgctgcccgcggtgatggccgggctgggcccctgcccctgggccgagtcgctgagccccatcggggacatgaaggtgaagggcgaggcgccggcgaacagcggagcaccggccggggccgcgggccgagccaagggcgagtcccgtatccggcggccgatgaacgctttcatggtgtgggctaaggacgagcgcaagcggctggcgcagcagaatccagacctgcacaacgccgagttgagcaagatgctgggtgagtccgagtcgcagacccaggcggccgggcgcgctggcgcgaatcgctaggccgatttcttaaaccccaaactgttctttgcgagcctgacgcccaaaaccaggggtgtgtagcggccacgtcctttcttaaggctctgggttcccttcccgcttcccgccctccgaccctccaaagcagctttccgccttgctctccggctcccggattccccaggtggccgggggcgcgggtccaacggctctgggaaggcgacttcccggcacctccgggcggcgcgagagcacccttggccctgaactgggccggttgtgtccatccctcgaccccttccctagttaggtgtccttttctgtttttcgaacgaccgggtgatgggtgagcggaaagccgcttccaggagaccaaaagaaaggggtgcctttagaggacgggtgttccccaagggctcggactcaggagtcccagatctccctctttaacttcaccccggttgcgcaattcaaagtctgaggggggaggtgcgtccaggtggggccaggtggggcctggagcgggagcgcagccgataagccctgcgcccctctcccccttccttccactgtgcaggcaagtcgtggaaggcgctgacgctggcggagaagcggcccttcgtggaggaggcagagcggctgcgcgtgcagcacatgcaggaccaccccaactacaagtaccggccgcggcggcgcaagcaggtgaagcggctgaagcgggtggagggcggcttcctgcacggcctggctgagccgcaggcggccgcgctgggccccgagggcggccgcgtggccatggacggcctgggcctccagttccccgagcagggcttccccgccggcccgccgctgctgcctccgcacatgggcggccactaccgcgactgccagagtctgggcgcgcctccgctcgacggctacccgttgcccacgcccgacacgtccccgctggacggcgtggaccccgacccggctttcttcgccgccccgatgcccggggactgcccggcggccggcacctacagctacgcgcaggtctcggactacgctggccccccggagcctcccgccggtcccatgcacccccgactcggcccagagcccgcgggtccctcgattccgggcctcctggcgccacccagcgcccttcacgtgtactacggcgcgatgggctcgcccggggcgggcggcgggcgcggcttccagatgcagccgcaacaccagcaccagcaccagcaccagcaccaccccccgggccccggacagccgtcgccccctccggaggcactgccctgccgggacggcacggaccccagtcagcccgccgagctcctcggggaggtggaccgcacggaatttgaacagtatctgcacttcgtgtgcaagcctgagatgggcctcccctaccaggggcatgactccggtgtgaatctccccgacagccacggggccatttcctcggtggtgtccgacgccagctccgcggtatattactgcaactatcctgacgtgtgacaggtccctgatccgccccagcctgcaggccagaagcagtgttacacacttcctggaggagctaaggaaatcctcagactcctgggtttttgttgttgctgttgttgttttttaaaaggtgtgttggcatataatttatggtaatttattttgtctgccacttgaacagtttgggggggtgaggtttcatttaaaatttgttcagagatttgtttcccatagttggattgtcaaaaccctatttccaagttcaagttaactagctttgaatgtgtcccaaaacagcttcctccatttcctgaaagtttattgatcaaagaaatgttgtcctgggtgtgttttttcaatcttctaaaaaataaaatctggaatcctgcttttttgctctactagtacctctgtcacactagtcttatcaaaaaccagttcttaagatcaatgttaagtttattagttaatgtaaatttctcatcctcgaaaagggtgaacataaatgcctttaaggagtatatctaaaaataaacattaggatatctaagtttgatgtaattgtttcaggaaggaaaaaagaaaagcattctggaatgagcctacttcaagtaatcttagtttctaaaactaacagttaatattttcaattccagtatatcactttaagtagaaggggatgtccaagtaattttggttttctaactgttgaatcataagcttgacctgcccccagaggctttttggatgtttttatctgtgttttgccatctctttacactcctcgacattcagtttaccttaatcttcacatttttacaccttgggaagtggcaagcatcgctgggtttaagataaaggagtcacaaaaactaatcaaaataaaatttgcattatgacaacttttaatacactttagcattttatttgattggttttttttttttttgcttttagatttaatacatatacggacgattgcacagacttaggggagaatccatgaatggtttgtgtgtagtgtccctatctatcaccattactttatcaagaagaaacagttacagggttgtgagtaaaagatggggatcagcccctgtaatctgccatactaatcgctgtggcacgtctcaccacatttgagattgagacataaatggaaacaggtgacttataatgggcatttcctgtgccagatgtttgttcaatgccattctaaacagtgtgagcctcaacaaacctgcaggtttaggtgctatttttcctattttgtaagaaaaggaggcaccaggccttcccctgccatgtatatgaaggcttgtattacaagttcttttgacatatttctcacctgttttcctctgggccagtatgtattcatgggcactgggagaatttacattctgttgatgagaaaccatataattatccttagcagcaagtgctatagaaaaaggaaaggcttggaggatagcttccagcatttacatgggagagatgtctgagctg

SEQ ID NO: 17 - DNA, 19255 bp, Human
ccttgagtcattaaaaaaaatcttcctatctatctatgtatctatcatccatctagctttgattttttcctcttctgtgctttattagttaattagtacccatttctgaagaagaaataacataagattatagaaaataatttctttcattgtaagactgaatagaaaaaattttctttcattataagactgagtagaaaaaataatactttgttagtctctgtgcctctatgtgccatgaggaaatttgactactggttttgactgactgagttatttaattaagtaaaataactggcttagtactaattattgttctgtagtatcagagaaagttgttcttcctactggttgagctcagtagttcttcatattctgagcaaaagggcagaggtaggatagcttttctgaggtagagataagaaccttgggtagggaaggaagatttatgaaatatttaaaaaattattcttccttcgctttgtttttagacataatgttaaatttattttgaaatttaaagcaacataaaagaacatgtgatttttctacttattgaaagagagaaaggaaaaaaatatgaaacagggatggaaagaatcctatgcctggtgaaggtcaagggttctcataacctacagagaatttggggtcagcctgtcctattgtatattatggcaaagataatcatcatctcatttgggtccattttcctctccatctctgcttaactgaagatcccatgagatatactcacactgaatctaaatagcctatctcagggcttgaatcacatgtgggccacagcaggaatgggaacatggaatttctaagtcctatcttacttgttattgttgctatgtctttttcttagtttgcatctgaggcaacatcagctttttcagacagaatggctttggaatagtaaaaaagacacagaagccctaaaatatgtatgtatgtatatgtgtgtgtgcatgcgtgagtacttgtgtgtaaatttttcattatctataggtaaaagcacacttggaattagcaatagatgcaatttgggacttaactctttcagtatgtcttatttctaagcaaagtatttagtttggttagtaattactaaacactgagaactaaattgcaaacaccaagaactaaaatgttcaagtgggaaattacagttaaataccatggtaatgaataaaaggtacaaatcgtttaaactcttatgtaaaatttgataagatgttttacacaactttaatacattgacaaggtcttgtggagaaaacagttccagatggtaaatatacacaagggatttagtcaaacaattttttggcaagaatattatgaattttgtaatcggttggcagccaatgaaatacaaagatgagtctagttaataatctacaattattggttaaagaagtatattagtgctaatttccctccgtttgtcctagcttttctcttctgtcaaccccacacgcctttggcacaatgaagtgggtaacctttatttcccttctttttctctttagctcggcttattccaggggtgtgtttcgtcgagatgcacgtaagaaatccatttttctattgttcaacttttattctattttcccagtaaaataaagttttagtaaactctgcatctttaaagaattattttggcatttatttctaaaatggcatagtattttgtatttgtgaagtcttacaaggttatcttattaataaaattcaaacatcctaggtaaaaaaaaaaaaaggtcagaattgtttagtgactgtaattttcttttgcgcactaaggaaagtgcaaagtaacttagagtgactgaaacttcacagaatagggttgaagattgaattcataactatcccaaagacctatccattgcactatgctttatttaaaaaccacaaaacctgtgctgttgatctcataaatagaacttgtatttatatttattttcattttagtctgtcttcttggttgctgttgatagacactaaaagagtattagatattatctaagtttgaatataaggctataaatatttaataatttttaaaatagtattcttggtaattgaattattcttctgtttaaaggcagaagaaataattgaacatcatcctgagtttttctgtaggaatcagagcccaatattttgaaacaaatgcataatctaagtcaaatggaaagaaatataaaaagtaacattattacttcttgttttcttcagtatttaacaatccttttttttcttcccttgcccagacaagagtgaggttgctcatcggtttaaagatttgggagaagaaaatttcaaagccttgtaagttaaaatattgatgaatcaaatttaatgtttctaatagtgttgtttattattctaaagtgcttatatttccttgtcatcagggttcagattctaaaacagtgctgcctcgtagagttttctgcgttgaggaagatattctgtatctgggctatccaataaggtagtcactggtcacatggctattgagtacttcaaatatgacaagtgcaactgagaaacaaaaacttaaattgtatttaattgtagttaatttgaatgtatatagtcacatgtggctaatggctactgtattggacagtacagctctggaacttgcttggtggaaaggactttaatataggtttcctttggtggcttacccactaaatcttctttacatagcaagcattcctgtgcttagttgggaatatttaatttttttttttttttaagacagggtctcgctctgtcgcccaggctggagtgcagtggcgcaatctcggctcactgcaaactccgcctcccgggttcacgccattctcctgcctcagcctcccgagtagctgggactacaggcgcccgccatcacgcccggctaatcttttgtatttttagtagagatggggtttcaccgtgtgccaggatggtctcaatctcctgacatcgtgatctgcccacctcggcctcccaaagtgctgggattacaggagtgagccaccgcgcccggcctatttaaatgttttttaatctagtaaaaaatgagaaaattgtttttttaaaagtctacctaatcctacaggctaattaaagacgtgtgtggggatcaggtgcggtggttcacacctgtaatcccagcactttggaaggctgatgcaggaggattgcttgagcccaggagttcaagaccagcctgggcaagtctctttaaaaaaaacaaaacaaacaaacaaaaaaattaggcatggtggcacatgcctgtagtcctagctacttaggaggctgacgtaggaggatcgtttggacctgagaggtcaaggctacagtgagccatgattgtgccactgcactccagcctgggtgacagagtgagactctgtctcaaaaaagaaaaaggaaatctgtggggtttgttttagttttaagtaattctaaggactttaaaaatgcctagtcttgacaattagatctatttggcatacaatttgcttgcttaatctatgtgtgtgcatagatctactgacacacgcatacatataaacattagggaactaccattctctttgcgtaggaagccacatatgcctatctaggcctcagatcatacctgatatgaataggctttctggataatggtgaagaagatgtataaaagatagaacctatacccatacatgatttgttctctagcgtagcaacctgttacatattaaagttttattatactacatttttctacatcctttgtttcagggtgttgattgcctttgctcagtatcttcagcagtgtccatttgaagatcatgtaaaattagtgaatgaagtaactgaatttgcaaaaacatgtgttgctgatgagtcagctgaaaattgtgacaaatcacttgtaagtacattctaattgtggagattctttcttctgtttgaagtaatcccaagcatttcaaaggaattttttttaagttttctcaattattattaagtgtcctgatttgtaagaaacactaaaaagttgctcatagactgataagccattgtttcttttgtgatagagatgctttagctatgtccacagttttaaaatcatttctttattgagaccaaacacaacagtcatggtgtatttaaatggcaatttgtcatttataaacacctctttttaaaatttgaggtttggtttctttttgtagaggctaatagggatatgatagcatgtatttatttatttatttatcttattttattatagtaagaacccttaacatgagatctaccctgttatatttttaagtgtacaatccattattgttaactacgggtacactgttgtatagcttactcatcttgctgtattaaaactttgtgcccattgattagtaacccctcgtttcgtcctcccccagccactggcaaccagcattatactctttgattctatgagtttgactactttagctaccttatataagtggtattatgtactgtttatctttttatgactgacttatttcccttagcatagtgcattcaaagtccaaccatgttgttgcctattgcagaatttccttcttttcaaggctgaataatattccagtgcatgtgtgtaccacattttctttatccattaatttgttgattgatagacatttaggttggttttctacatcttgactatcatgaatagtgttgcaatgaacacaggagagctactatctcttagagatgatatcatggtttttatcatcagaaaacacccactgatttctatgctaattttgttacctgggtggaataatagtacagctatatattcctcattttagatatctttgtatttctacatacaataaaaaagcagagtacttagtcatgttgaagaactttaaacttttagtatttccagatcaatcttcaaaacaaggacaggtttatctttctctcaccactcaatctatatatacctcttgtgggcaaggccagtttttatcactggagcctttcccctttttattatgtacctctccctcacagcagagtcaggactttaactttacacaatactatggctctacatatgaaatcttaaaaatacataaaaattaataaattctgtctagagtagtatattttccctggggttacagttactttcataataaaaattagagataaggaaaggactcatttattggaaagtgattttaggtaacatttctggaagaaaaatgtctatatcttaatagtcacttaatatatgatggattgtgttactcctcagttttcaatggcatatactaaaacatggccctctaaaaagggggcaaatgaaatgagaaactctctgaatgtttttctcccctaggtgaattcacctgctgcttagaagcttattttctcttgatttctgttataatgattgctcttaccctttagttttaagtttcaaaataggagtcatataactttccttaaagctattgactgtctttttgtcctgttttattcaccatgagttatagtgtgacagttaattcttatgaaaattatatagagatggttaaatcatcagaaactgtaaacctcgattgggaggggaagcggatttttaaatgatttcctgaccaagcttaaccagtatattaaatcctttgtactgttctttggctataaagaaaaaaggtactgtccagcaactgaaacctgctttcttccatttagcataccctttttggagacaaattatgcacagttgcaactcttcgtgaaacctatggtgaaatggctgactgctgtgcaaaacaagaacctgagagaaatgaatgcttcttgcaacacaaagatgacaacccaaacctcccccgattggtgagaccagaggttgatgtgatgtgcactgcttttcatgacaatgaagagacatttttgaaaaagtaagtaatcagatgtttatagttcaaaattaaaaagcatggagtaactccataggccaacactctataaaaattaccataacaaaaatattttcaacattaagacttggaagttttgttatgatgattttttaaagaagtagtatttgataccacaaaattctacacagcaaaaaatatgatcaaagatattttgaagtttattgaaacaggatacaatctttctgaaaaatttaagatagacaaattatttaatgtattacgaagatatgtatatatggttgttataattgatttcgttttagtcagcaacattatattgccaaaatttaaccatttatgcacacacacacacacacacacacacttaacccttttttccacatacttaaagaatgacagagacaagaccatcatgtgcaaattgagcttaattggttaattagatatctttggaatttggaggttctggggagaatgtcgattacaattatttctgtaatattgtctgctatagaaaagtgactgtttttctttttcaaaatttagatacttatatgaaattgccagaagacatccttacttttatgccccggaactccttttctttgctaaaaggtataaagctgcttttacagaatgttgccaagctgctgataaagctgcctgcctgttgccaaaggtattatgcaaaagaatagaaaaaaagagttcattatccaacctgattttgtccattttgtggctagatttagggaacctgagtgtctgatacaaactttccgacatggtcaaaaaagccttccttttatctgtcttgaaaatctttcatctttgaaggcctacactctcgtttcttcttttaagatttgccaatgatgatctgtcagaggtaatcactgtgcatgtgtttaaagatttcaccactttttatggtggtgatcactatagtgaaatactgaaacttgtttgtcaaattgcacagcaaggggccacagttcttgtttatcttttcatgataatttttagtagggagggaattcaaagtagagaattttactgcatctagatgcctgagttcatgcattcattccataaatatatattatggaatgctttattttcttttctgaggagtttactgatgttggtggaggagagactgaaatgaattatacacaaaatttaaaaattagcaaaattgcagcccctgggatattagcgtactctttctctgacttttctcccacttttaaggctctttttcctggcaatgtttccagttggtttctaactacatagggaattccgctgtgaccagaatgatcgaatgatctttccttttcttagagagcaaaatcattattcgctaaagggagtacttgggaatttaggcataaattatgccttcaaaatttaatttggcacagtctcatctgagcttatggaggggtgtttcatgtagaatttttcttctaattttcatcaaattattcctttttgtagctcgatgaacttcgggatgaagggaaggcttcgtctgccaaacagagactcaagtgtgccagtctccaaaaatttggagaaagagctttcaaagcatggtaaatacttttaaacatagttggcatctttataacgatgtaaatgataatgcttcagtgacaaattgtacatttttatgtattttgcaaagtgctgtcaaatacatttctttggttgtctaacaggtagaactctaatagaggtaaaaatcagaatatcaatgacaatttgacattatttttaatcttttcttttctaaatagttgaataatttagaggacgctgtcctttttgtcctaaaaaaagggacagatatttaagttctatttatttataaaatcttggactcttattctaatggttcattatttttatagagctgtaggcatggttctttatttaattttttaaagttatttttaatttttgtggatacagagtaggtatacatatttacggggtatatgagatattttgatataagtatacaacatatataatccctttatttaattttatcttccccccaatgatctaaaactatttgcttgtccttttatgtcttatagttaaattcagtcaccaactaagttgaagttacttcttatttttgcatagctccagctctgatcttcatctcatgtttttgcctgagcctctgttttcatattacttagttggttctgggagcatactttaatagccgagtcaagaaaaatactagctgccccgtcacccacactcctcacctgctagtcaacagcaaatcaacacaacaggaaataaaatgaaaataatagacattatgcatgctctctagaaactgtcaattgaactgtatttgctcatcattcctaccatctacaccaccaaaatcaaccaaatttatgaaaaaaaacagccccaacataaaattatacacagataaacaggctatgattggttttgggaaagaagtcacctttacctgatttaggcaactgtgaaatgactagagaatgaagaaaattagacgtttacatcttgtcatagagtttgaagatagtgctggatctttctttttataagtaagatcaataaaaactccctcattctgtagaagttatgatttcttttctaagagacctttagaagtcagaaaaaatgtgtttcaattgagaaaaaagataactggagtttgtgtagtacttcccagattataaaatgcttttgtatgtattatctaatttaatcctcaaaacttcttcaatttagcatgttgtcatgacactgcagaggctgaagctcagagaggctgagccctctgctaacaagtcctactgctaacaagtgataaagccagagctggaagtcacatctggactccaaacctgatgcttctcagcctgttgccccttttagagttcctttttaatttctgcttttatgacttgctagatttctacctaccacacacactcttaaatggataattctgccctaaggataagtgattaccatttggttcagaactagaactaatgaattttaaaaattatttctgtatgtccattttgaattttcttatgagaaatagtatttgcctagtgttttcatataaaatatcgcatgataataccattttgattggcgattttctttttagggcagtagctcgcctgagccagagatttcccaaagctgagtttgcagaagtttccaagttagtgacagatcttaccaaagtccacacggaatgctgccatggagatctgcttgaatgtgctgatgacagggtaaagagtcgtcgatatgctttttggtagcttgcatgctcaagttggtagaatggatgcgtttggtatcattggtgatagctgacagtgggttgagattgtcttctgtgctttcgtctgtcctatcttcaatctttccctgcctatggtggtggtacctttctgtttttaacctggctataaattaccagataaacccattcactgatttgtaactcctttcagtcatgctctaactgtaaatgaaggcttaaactgaagtagaacagttacaaggttttacttggcagaacatcttgcaaggtagatgtctaagaagatttttttttctttttttaagacagagtttcgctcttgtttcccaggctggggtgcaatggtgtgatcttggctcagcgcaacctctgcctcctgggttcaagtgattctcatgcctcagcctcccaagtagctgggattacaggcatgcgccaccacacctggctaattttgtatttttagtagaggcggggtttcaccatattgtccagactggtctcgaactcctgacctcaggtgatccacccgccttggcctcccaaagtgctgggattacaggcatgagccaccttgcccagcctaagaagattttttgagggaggtaggtggacttggagaaggtcactacttgaagagatttttggaaatgatgtatttttcttctctatattccttcccttaattaactctgtttgttagatgtgcaaatatttggaatgatatctcttttctcaaaacttataatattttctttctccctttcttcaagattaaacttatgggcaaatactagaatcctaatctctcatggcactttctggaaaatttaaggcggttattttatatatgtaagcagggcctatgactatgatcttgactcatttttcaaaaatcttctatattttatttagttatttggtttcaaaaggcctgcacttaattttgggggattatttggaaaaacagcattgagttttaatgaaaaaaacttaaatgccctaacagtagaaacataaaattaataaataactgagctgagcacctgctactgattagtctattttaattaagtgggaatgtttttgtagtcctatctacatctccaggtttaggagcaaacagagtatgttcatagaaggaatatgtgtatggtcttagaatacaatgaatatgttctgccaacttaataaaggtctgaggagaaagtgtagcaatgtcaattcgtgttgaacaatttccaccaacttacttataggcggaccttgccaagtatatctgtgaaaatcaagattcgatctccagtaaactgaaggaatgctgtgaaaaacctctgttggaaaaatcccactgcattgccgaagtggaaaatgatgagatgcctgctgacttgccttcattagctgctgattttgttgaaagtaaggatgtttgcaaaaactatgctgaggcaaaggatgtcttcctgggcatgtaagtagataagaaattattcttttatagctttggcatgacctcacaacttaggaggatagcctaggcttttctgtggagttgctacaatttccctgctgcccagaatgtttcttcatccttccctttcccaggctttaacaatttttgaaatagttaattagttgaatacattgtcataaaataatacatgttcatggcaaagctcaacattccttactccttaggggtatttctgaaaatacgtctagaaacattttgtgtatatataaattatgtatacttcagtcattcattccaagtgtatttcttgaacatctataatatatgtgtgtgactatgtattgcctgtctatctaactaatctaatctaatctagtctatctatctaatctatgcaatgatagcaaagaagtataaaaagaaatatagagtctgacaccaggtgctttatatttggtgaaaagaccagaagttcagtataatggcaatatggtaggcaactcaattacaaaataaatgtttacatattgtcagaagttgtggtgataaactgcatttttgttgttggattatgataatgcactaaataatatttcctaaaattatgtaccctacaagatttcactcatacagagaagaaagagaatattttaagaacatatctctgcccatctatttatcagaatccttttgagatgtagtttaaatcaaacaaaatgttaataaaaataacaagtatcattcatcaaagacttcatatgtgccaagcagtgtgtgctttgtgtagattatgtcatatagttctcataatccaccttccgagacagatactatttattttttgagacagagttttactcttgttgcccaggctggagtgcaatggtgccatctcggctcaccacaacctccgcctcccaggttcaagcgattctcctgcctcagcctcctgggattacaggcatgcaccaccatgcctggctaattttgtatttttagtagagatggggtttcaccatgttggtcagactggtctcaaactcctgacctctggtgatatgcctgcctcagcctcctaaagtgctgggattacaggcatgagccactgtgcccagccgacagatactattattatttccattctaccgagaaggagactaaggctctgatcatttaaataagttgcctaaggtgatgcagtgatataagtagcagagctaggaattgagccttggtaactttaactctggaccccaagtccttagctactaagctttactgcatggggtttagtcaaattaagacttttggaatatgagttacttttgagattagctttgtgatattttttgtgctcatttgtccaacaaagtctattttattttcatcttaattaggtttttgtatgaatatgcaagaaggcatcctgattactctgtcgtgctgctgctgagacttgccaagacatatgaaaccactctagagaagtgctgtgccgctgcagatcctcatgaatgctatgccaaagtggtaggtttattgttggaaaaaaatgtagttctttgactgatgattccaataatgagaaagaaaaataatgcaagaatgtaaaatgatatacagtgcaatttagatcttttcttgagatggtttcaattctggaatcttaaacatgaaagaaaaagtagccttagaatgattaacaaaatttagactagttagaatagaaagatctgaatagagcaatctctaaaaaattttgatctttttttctctttttcacaatcctgagaacaaaaaaaaattaaatttaaatgttaattagaagatatttaacttagatgtaaagtgagttaacctgattccaggattaatcaagtactagaattagtatcttatggcaaattatagaacctatccctttagaatattttcaaatctttttgaggatgtttaggaatagttttacaagaaattaagttaggagaggaaatctgttctggaggatttttagggttcccactagcatatgtaatggtttctgaactattcagaatcagagaaaactcatttttcctgctttcaagaagctactgtatgccaggcaccatgcacaaacaatgaccaacgtaaaatctctcattttggagagcctggaatctaactggaaaggtgaactaataataataatatgtacaatcatagccatcatttattaaacttttattatatgcaaggcactgtttaatttcattagcttacctggtttacagagcagctctatgagatgagtgccatctttgcccctattttagggataaggattctgaaatgtggagatggtaagtaaaattgcacaactgaagaatgagttacatgacttggctcaaatactggtcattgaactccagagcctgaatattcttaaccacttacatgatgcaagctcaccaaataaatagttcgaatgtattgtgacagagcggcattgatattcatctattcatgtggctttgagtaggaagaagaaaggatatcattctgaccagaggggtgaaaaacaacctgcatctgatcctgaggcataatactattaacacaattcttttatgtttcagttcgatgaatttaaacctcttgtggaagagcctcagaatttaatcaaacaaaattgtgagctttttgagcagcttggagagtacaaattccagaatgcgtaagtaatttttattgactgattttttttatcaatttgtaattatttaagacttaatatatgagccacctagcatagaacttttaagaatgaaaatacattgcatatttctaatcactctttgtcaagaaagataggagaggagagataaaatagttgatggggtggagaggtctatatttgaatgtagtctaaaaattgttctcttaagattggaagtatgtaggctgggagggtaaataccaaatcttggtatatcagaactgagcatgtcccttgaaggttaagaaatagttaatgggcaaatagagcatggcaatattttgtagagcagcaagtagtaggccttgaatagatgtcgctcaaaaagtaatatgtaagctgaacacaaaaatgtaacaaatgaatttagatacatatttgaatattaaattcaggttgtttgggagatgcacctagtctttgatggttaaacctttccctccatagaagagacagagacagaatggcttgctggactaatgtcccaattcaatagagtcttatctatgaaggttaaaaacaagaagagacatattatacagtagatatttattgtgtggctcatacacatggtgctcttctgattatggattttagagataataacagtgaacaagacatagtttctttcctcgagtagattaaagtcatacattgacttttaatggtgactggcattcttaatacatgattattatatattaggtaccatgtcagattaattataatactttactacttttaatttaacccttgaactatccctattgagtcagatatatttccttccattttctacttgtatctttcaagtttagcatatgctgatacatatgaagctctctccaggttttattgaaagaagaaattaataaatttattaatgtcactgaattaggcaactcactttcccaagattatgcaagtggtacaggtggaactcaaagccaagtttaactagttgttcaggagaatgttttctaccctccactaacccactactctgcagatggagataatatgatgaatggaacatagcaacatcttagttgattccggccaagtgttctctgttttatctactatgttagacagtttcttgccttgctgaaaacacatgacttctttttttcaggctattagttcgttacaccaagaaagtaccccaagtgtcaactccaactcttgtagaggtctcaagaaacctaggaaaagtgggcagcaaatgttgtaaacatcctgaagcaaaaagaatgccctgtgcagaagactatgtgagtctttaaaaaaatataataaattaataatgaaaaaattttacctttagatattgataatgctagctttcataagcagaaggaagtaatgtgtgtgtgtgcatgtttgtgtgcatgtgtgtgtgcatgcacgtgtgtgtatgtgtgatattggcagtcaaggccccgaggatgataattttttttttttttttgagacggagtctcgctttgttgtccaggctggagtgcagtggtgccatctcggctcactgcaacctccgcctcccaggttcaagccattctcctgcctcagcctcccaagtagctgggactacaggtgcatgccaccatgcctggctaattttttgtatttttagtagaaaattttcagcttcacctcttttgaatttctgctctcctgcctgttctttagctatccgtggtcctgaaccagttatgtgtgttgcatgagaaaacgccagtaagtgacagagtcaccaaatgctgcacagaatccttggtgaacaggcgaccatgcttttcagctctggaagtcgatgaaacatacgttcccaaagagtttaatgctgaaacattcaccttccatgcagatatatgcacactttctgagaaggagagacaaatcaagaaacaaacgtgaggagtatttcattactgcatgtgtttgtagtcttgatagcaagaactgtcaattcaagctagcaactttttcctgaagtagtgattatatttcttagaggaaagtattggagtgttgcccttattatgctgataagagtacccagaataaaatgaataactttttaaagacaaaatcctctgttataatattgctaaaattattcagagtaatattgtggattaaagccacaatagaataacatgttaggccatattcagtagaaaaagatgaacaattaactgataaatttgtgcacatggcaaattagttaatgggaaccataggagaatttatttctagatgtaaataattattttaagtttgccctatggtggccccacacatgagacaaacccccaagatgtgacttttgagaatgagacttggataaaaaacatgtagaaatgcaagccctgaagctcaactccctattgctatcacaggggttataattgcataaaatttagctatagaaagttgctgtcatctcttgtgggctgtaatcatcgtctaggcttaagagtaatattgcaaaacctgtcatgcccacacaaatctctccctggcattgttgtctttgcagatgtcagtgaaagagaaccagcagctcccatgagtttggatagccttattttctatagcctccccactattagctttgaagggagcaaagtttaagaaccaaatataaagtttctcatctttatagatgagaaaaattttaaataaagtccaagataattaaatttttaaggatcatttttagctctttaatagcaataaaactcaatatgacataatatggcacttccaaaatctgaataatatataattgcaatgacatacttcttttcagagatttactgaaaagaaatttgttgacactacataacgtgatgagtggtttatactgattgtttcagttggtcttcccaccaactccatgaaagtggattttattatcctcatcatgcagatgagaatattgagacttatagcggtatgcctgagccccaaagtactcagagttgcctggctccaagatttataatcttaaatgatgggactaccatccttactctctccatttttctatacgtgagtaatgttttttctgttttttttttttctttttccattcaaactcagtgcacttgttgagctcgtgaaacacaagcccaaggcaacaaaagagcaactgaaagctgttatggatgatttcgcagcttttgtagagaagtgctgcaaggctgacgataaggagacctgctttgccgaggaggtactacagttctcttcattttaatatgtccagtattcatttttgcatgtttggttaggctagggcttagggatttatatatcaaaggaggctttgtacatgtgggacagggatcttattttacaaacaattgtcttacaaaatgaataaaacagcactttgtttttatctcctgctctattgtgccatactgttaaatgtttataatgcctgttctgtttccaaatttgtgatgcttatgaatattaataggaatatttgtaaggcctgaaatattttgatcatgaaatcaaaacattaatttatttaaacatttacttgaaatgtggtggtttgtgatttagttgattttataggctagtgggagaatttacattcaaatgtctaaatcacttaaaattgccctttatggcctgacagtaacttttttttattcatttggggacaactatgtccgtgagcttccgtccagagattatagtagtaaattgtaattaaaggatatgatgcacgtgaaatcactttgcaatcatcaatagcttcataaatgttaattttgtatcctaatagtaatgctaatattttcctaacatctgtcatgtctttgtgttcagggtaaaaaacttgttgctgcaagtcaagctgccttaggcttataacatcacatttaaaagcatctcaggtaactatattttgaattttttaaaaaagtaactataatagttattattaaaatagcaaagattgaccatttccaagagccatatagaccagcaccgaccactattctaaactatttatgtatgtaaatattagcttttaaaattctcaaaatagttgctgagttgggaaccactattatttctattttgtagatgagaaaatgaagataaacatcaaagcatagattaagtaattttccaaagggtcaaaattcaaaattgaaaccaaagtttcagtgttgcccattgtcctgttctgacttatatgatgcggtacacagagccatccaagtaagtgatggctcagcagtggaatactctgggaattaggctgaaccacatgaaagagtgctttatagggcaaaaacagttgaatatcagtgatttcacatggttcaacctaatagttcaactcatcctttccattggagaatatgatggatctaccttctgtgaactttatagtgaagaatctgctattacatttccaatttgtcaacatgctgagctttaataggacttatcttcttatgacaacatttattggtgtgtccccttgcctagcccaacagaagaattcagcagccgtaagtctaggacaggcttaaattgttttcactggtgtaaattgcagaaagatgatctaagtaatttggcatttattttaataggtttgaaaaacacatgccattttacaaataagacttatatttgtccttttgtttttcagcctaccatgagaataagagaaagaaaatgaagatcaaaagcttattcatctgtttttctttttcgttggtgtaaagccaacaccctgtctaaaaaacataaatttctttaatcattttgcctcttttctctgtgcttcaattaataaaaaatggaaagaatctaatagagtggtacagcactgttatttttcaaagatgtgttgctatcctgaaaattctgtaggttctgtggaagttccagtgttctctcttattccacttcggtagaggatttctagtttcttgtgggctaattaaataaatcattaatactcttctaagttatggattataaacattcaaaataatattttgacattatgataattctgaataaaagaacaaaaaccatggtataggtaaggaatataaaacatggcttttaccttagaaaaaacaattctaaaattcatatggaatcaaaaaagagcctgcagaaccaaagtaagactaagcaaaaagaacaaattacctgatttcaaactacactataaggccatagtcaccgaaacagcaaggtactggtataaaaataggcacacagaccaatggaatagaacagaatagagaacccagaaataaatccacatacttacagctaactgattttagacaaagaaaacaaaaacataaggtggggaaaggacaactttttcaacaaatggtgctaggataattggcaagcacatgtaggagactgaagctagatcctcatctctcaccttatacaaacatcaactcaagatggattaggaacttaaatctaaggcctaaaactataaaaattctagaagataacattgggaaaaacccttctacatataggcttaggcaaggatttcatgaccaagaacccaaaacaaatacaatgaaaacaaagataaattgctgggacttcattaaactaaagagcttttgcatggcatggcaaaagaaacagtcagctgagta

SEQ ID NO: 18 - DNA, 22012 bp, Human
gtatttgctggaagtgctactgacggtaaaccctttttgtttaaatgtgtgccctagtagcttgcagtatgatctattttttaagtactgtacttagcttatttaaaaattttatgtttaaaattgcatactgctctttcattgaagaagttttgagagagagatagaattaaattcacttatcttaccatctagagaaacccaatgttaaaactttgttgtccattatttctgtcttttattcaacattttttttagagggtgggaggaatacagaggaggtacaatgatacacaaatgagagcactctccatgtattgttttgtcctgtttttcagttaacaatatattatgagcatatttccatttcattaaatattcttccacaaagttattttgatggctgtatatcaccctactttatgaatgtaccatattaatttatttcctggtgtgggttatttgattttataatcttacctttagaataatgaaacacctgtgaagctttagaaaatactggtgcctgggtctcaactccacagattctgatttaactggtctgggttacagactaggcattgggaattcaaaaagttcccccagtgattctaatgtgtagccaagatcgggaacccttgtagacagggatgataggaggtgagccactcttagcatccatcatttagtattaacatcatcatcttgagttgctaagtgaatgatgcacctgacccactttataaagacacatgtgcaaataaaattattataggacttggtttattagggcttgtgctctaagttttctatgttaagccatacatcgcatactaaatactttaaaatgtaccttattgacatacatattaagtgaaaagtgtttctgagctaaacaatgacagcataattatcaagcaatgataatttgaaatgaatttattattctgcaacttagggacaagtcatctctctgaattttttgtactttgagagtatttgttatatttgcaagatgaagagtctgaattggtcagacaatgtcttgtgtgcctggcatatgataggcatttaatagttttaaagaattaatgtatttagatgaattgcataccaaatctgctgtcttttctttatggcttcattaacttaatttgagagaaattaattattctgcaacttagggacaagtcatctctttgaatattctgtagtttgaggagaatatttgttatatttgcaaaataaaataagtttgcaagttttttttttctgccccaaagagctctgtgtccttgaacataaaatacaaataaccgctatgctgttaattattggcaaatgtcccattttcaacctaaggaaataccataaagtaacagatataccaacaaaaggttactagttaacaggcattgcctgaaaagagtataaaagaatttcagcatgattttccatattgtgcttccaccactgccaataacaaaataactagcaaccatgaagtgggtggaatcaatttttttaattttcctactaaattttactgaatccagaacactgcatagaaatgaatatggaataggtgagatattttgtgtttttcttgtcttttctctatatcaaaattttttaaattataaaatttgcattaatttgtcttgatttattattcatatttattattccacatggagaaaaaatatttaactgatggatatatttaaatgaaagataaacttgtaactttacaagaggtttacaaagttatagcagtgtttaatggatgaatggtttgtatgtttcatgttgaattaatttttacacttcaatggtatgcatattaactttgaaaaattatatatatacacatatatgtacatatatatgaatataaataaaattttatatgtgaagaagccagaattatgctccttcacataactccctcagactagtaaaatagataaaatctttgtttttaatacagaaaaatgggtcattatttgatggtctgaagaagaaatattgtgactgggatatgaatggcaaaccgtagtataactatgttcaaaagaatgcctgaaatatatttttaaccatttgactttcaggacagttacagcactacagtacagggaaaaaccaaacaactggaagacaaaatctggattttagtgataggtctactataaattatgcttgttaacttcattccttagtttcctagttttcttttcctcaagtataaaattaagatgcttaggttatccctaatgttcttttaattctgaaactgtacagttctaactgaaacacaaacattcatatgtaacaatgattactttcttggttgcagttgaaaacacgtttcatgaagtttattttgctttccagcttccatattggattcttaccaatgtactgcagagataagtttagctgacctgtaagttttgcttatataaatgtactttaaatgtgtaaagcaaggataagtaaatacttaaataaaattgggtacccctgtgagctcttaaaagcacaaaagcaatttggacaatttcaagaaaagttactcatactgaatatcaacttgatgttgaagaggttaaactgttgactaatgtcttcgacattgaccttttgattccttgaaatctcatgagtcaaaccaaatcagattttagaaactgaagattagtgtctgatcagtgacagccatatactaattcaggaatttttctcatcagtaccaacagggtgatattataatgttttcttttctgtatactatttaaatcttagcagcaaaccataggtgataaaatattctatttgctgttatttgtggagagtatgttagtctcttggatgtctttccattccacattttaaaaatttctaacaaagaatttaaagtagtgtgttgctgttactccttgcacatccaaacctgcataaggattgctttgagtcaatccatgagcactgtagtcttgggttttagaccttgatcatactgggaatagacactgttagaggtctgtctaattaccaatttttttttgcttaaatttaaaagtaaccataaagaatatagataccctcaattatgggtacattacagtagatggatggtcacagaaggagaaaccactcttatgggaaatccacttattttagcctttaacatctatatgtatatttatggcaaaagaaaacaagaaaaagactaaagtttcttctcagatgacctggaagctaattttacataattttacaaatcaaatgtctaaacagattacaacataaatagaaaacaaaacaaacaaatgaaaaactatacttgagaaaaataagcttgctgcaggtctgttccttaaggattcacacgtatttttgtttcagggctaccatattttttgcccagtttgttcaagaagccacttacaaggaagtaagcaaaatggtgaaagatgcattgactgcaattgagaaacccactggagatgaacagtcttcagggtgtttagaaaaccaggtgagtgaataattttaaaaaagcattgtgatatttgacaaaaatttagcatgctgaagagaagatacaaaaatagcagtgaaaaatgcatttatatatttgaagagctattgtatgaaagagggattagattcattctgaattgctaaagagggcagaagagaacaataggtagttattataaagagaccatataaatatgatgactgagagctaaggttctgaaataagattatcttgatgactatgggcatattaacttttttgagcttcagttttcttatctgtaaaataagggatgataatagctcccatttcatagttagcatggaaattgatataacagcaatagtagctaacttttattatacacacaatgtgactggcattattctagggagcataatgtgtatattgataataaaaatattttatgacataggggatagatagcactgatgaatcagaatggttgtccagtgagtcaagagatgctggctcgggcttctgggcaggatatcagctttgcttacctatatttatttattaaacatttaaaataatccttgaagatagatgctaatcttccaactgaggaagctgaggctcagagaatttaagtaactttcttatgggaaccaccaaatggcagagccaggatttgaactagaccatctggcttaaaattgacagtcttagtagcttcattacactataactatagtgaatgtaagatgcatagcacatcgttagggttgccaggtttagcaaacaacaacaaaacataatacccagttcaatctgaattttagataaacactaaatacttttcttagtataaggatatttcattgtagaagctcaacaaataatatttattatttattttatctcaacatagaaacaaacttgataatgattagaactctccaattataaaacaacatgcccagagaatactctgttatggtggggttaattaggtggctgaaagacaatgtacctggaatatcatagaagagatgctcctttaaggatatagtttaagttctttccaactttgaaatttatgaattgacaaaaatttctgttttgcatctctatttttgtcttgttctgataatcttttcaaaatgtgtataaaaaaacaagaatacattatctattgcaactttacaaccaattagaggttcaaggtaatgttacagatcgctgatttattcttgtaaattcaaaggtatgtcttttaaatgaggattgggaattagaaatcttacgtaagccttccaggattctctaaatattactgtagcagctataaaagctacataaaagttccctcagatacatgaaacacatgtattcctcagatgctttctgtggaatattgatgctgtcatctgagtttggtaagggtaagtcacagaggaggaaacacatacattttaaaacattttagctaaatatgtaattgtggccaagaaaagtgtttttttaaaaaataattatttcatttcaaaatcatttttatttataattgaaaataatatgcagttttttattgtcttgtaaggatggcatgtaaaatgagcatttatgtctgaaatgtggtatgtctgtgtgtgtgtgtgtatatgtatatatatgtatgtatataccataatatatacatatgtatttgcaattccaaaagttacatctttaatgagaatcatgaaaatattattttgctcagtttctttttttatttaaatttaaatttaaagttctggtgtacacgggcaggatgagcaggtctgttacataggtaaacacgtggcatggtggtttgctgcacctaccaacctgttgcctgggtattaagcccagcgtgcattacctatttttcctaatgctctccctccctgcactccactccctgacaggccccagtgtgtgctgtttccctccctgtgtccatgaaacatggtttatatatttataaaagtttatatatcctagtccaaatttttgataacacaaaaaggaaaaataaaataattcaaaattgggaaagagaaacaaaagattgcatggcttttttccttttattgtttggacattaaagtctcattttccataaggcagcaaagaaatctatttcatcaggctgaaacaaaatacattagaatttgtatggaaaatttttcagaatctatagttctgattttagacattagaaaatgtttcatgtgtcttatagatttttaaagcaaagttagttgtctttctccaaacataaaatatttcttatagctacctgcctttctggaagaactttgccatgagaaagaaattttggagaagtacggacattcagactgctgcagccaaagtgaagagggaagacataactgttttcttgcacacaaaaagcccactccagcatcgatcccacttttccaagttccagaacctgtcacaagctgtgaagcatatgaagaagacagggagacattcatgaacaagtaaggatccagtttaaaggtagatgcaaacctcagaaacacagcaatggcaagcctaatttagtatttttgcaatgtactcatgtactcccagtaagaggtataatgtttctttggtgttgtgtctgctgaggtcccagacaaggtaattaggagagcaacattcaatgtaacttggtttccatagcacgctagatgtagtacaaaccacaggacaaacctaccagaggttccattagtcccttgagagatatacaccttttttttttctttttacccattctactctcaattttaccttgttcaagaatatattagtattgcaccaaattgatgctttccagagccatatattggtgttttgtgttcacctaattgcctagaaataaaagttagagatccaagcatggtcaagcatggtcaagatacacagacatggcaaaggtttactgaacacttaggatgttgtggggccgggcgcggtggctcacgcttgtaatcccagcactttgggaggccgaggcgggcggatcacgaggtcaggagatcgagaccatcctggctaacatggtgaaaccccgtctctactaaaaatacaaaaaaaattagccgggcgtgatggtgggcgcctgtagtcccagctactcgggaggctgaggcaggagaatggcgtgaaccctggaggcggagcttgcagtgagccgagattgcgccactgcactcccgccggggccacagagcgagactccgtctcaaaaaaaaaaaaaaaaaaaggatgttgtggaaacatgtctgcttgcacagaggatcagattaacactcacaaacaaactttgaagcctccttctcctcttcctcttcattcttcttctttcccccattttgttgataggaaattgaaggttggaaggctaaaacaactggctaagggcacacagctagtacatttgaccccaggttctctgttggagaagcctgtacgtaactcttcatcacttctgccttccatgttacttcctaaaccagataaatagagagattgcccttagaacatctctgctatggcgactatccaggtgcataaccccattctgcactgacaagggataaaatgtccatctttctgttgcacttagcagaagtctggctttgctgatccctgaaacatatctgagtaggcttattgaaaaggaccttttaataagaatcatggttagcatgtctgcctattttcttctcataatagaatctggtaccatctgtcagatatttttccccccaggatctttagtgaggaaaattttgacaacatgtggaaaaaatatgatgattttccccttaggaacacagtaaagacaaagtcaaatgcattttgttgttgttgtttttgaatctttaaataaatcccagtgtccagttccaagcagtagtagtcctatttttaggtgtttataaatcttctagctctattttatttcacagattcatttatgagatagcaagaaggcatcccttcctgtatgcacctacaattcttctttgggctgctcgctatgacaaaataattccatcttgctgcaaagctgaaaatgcagttgaatgcttccaaacaaaggtatcatatttgcgtggatatctgaaccagtactgtagtctatgactcattaaaacaaaacaaagttaaaaatgaaaacgtgcttaattgtggagagtatcgtttttggaatagagaaatagttcagcagtctgatattcttcgagtgaacaaaactggatttgctggtttttattatctattcattaagtcaacaataattttattattaaggaagtgagtttgatgggataaagaaggaaagacagacagacagaaagagagaaagagagggtgctataaatgggaaggagtaagtgaaagaaaacggagaaaaggaggagcagaggagagagaaaaaatgaagaactatgataaatgctttatacttactgtttttttaaaccttagaacaaatttgaggtgtaagtatttttgtcctttaacaaactaggaaagaggtttagagaagaaaattttttttaggtttagagaggtagaataatatccaccattaactacttgctaccagcagtcctataacaaaaatttcctgagaactgactactctcagtgtcaagccgtgatacaatcgtattttttgtaactgagaagacacttaagaaattagcaggcttcaatttgtctttaagctgtttaaaggtacagttgttcatttatgatccccagtataaaagttatgtttttgtttcaaggtactttgagtaaatttgtctggcacagatgcatataaactaacccaaaagaataaatgagtcaataatattctgcgataatgtatgacatttataatttttagtaaaaaacatattttatggaatttcattttacctatacttgttgtttttctaaatattagagcttgtaaagaaaatgttagtatatgctttcatgacattttgtttcctctacatctaggcagcaacagttacaaaagaattaagagaaagcagcttgttaaatcaacatgcatgtgcagtaatgaaaaattttgggacccgaactttccaagccatgtaagttcaagttctatctagggaagagggtgagagctacagaactaccattttgcaatttgggttcgtttttttaattgttgctgttttagagaatgaagacccctttgtgacccctttgatgagggctaatgggattagaaccatgaactcttaggatcagaaggaagctaacggataagtcagtttaacacttactaaagcctagctgagataatacatagaaaagacttttaaagtttatgttatttacctgttctttaagacacttaagttctggcctgccatcaaattatacctcatcactagaccatatttttctagctcttctacaaaataagtcagccttcactgagtgtcatttaaaacttttgccttaacaagaaattctttatattaattgtgtttcttaatcttctataaggctctttatagcatttattgcttcccataaaaatattcctttgaggcaataatattagaatctagtgtcaggagaaaagaacattttaaattatataacttctttaaagtactcatcaactcttttatgataaaacatttctagtatatgaaaatatctgagctgctaatcgaatagtagtaagtatatatattcagagtttatttgattgctgtttggttaaataacacgttaaagcatattgtagacaatggaaatctagaatgaagtttttagtaatagaattagttctaaagactgaaatttcttcttgtaagaagtcagatttatgccttaactaccctccaactcaattagaaattgaaagattaatttatgacctactttaaaaaaatttatcttagtaataaaatagaaattgagatagtattataatacccttatcatttgctatccataagtgaaagctaagtggtctaaatttatagagaagatccatctttatcagaagcaggagtaacactattttctctaggagcaatggttttacaaagacaactcttaaaatttaatgaaatatgcagaggaaaccagaatttttatttcttacttcttttttggccacattactctcttggcacactggtatgcctgaaatgtttaatctgctccactttcttgtcccatttcattgatttgcacatacgcctcctttcctggattctcagaagtattttttaccccagtaaaaaatggttctcattttcatggaattttccatttcttaattgtttatccttttaaagttttatgtccactcaatacaaatgctcagcataagggttgaatggcaaaaataatttaccttaattcttaagacatgttttaggaaaagataaattatttctaaaccatttgtggggccagctcacagtttacagagctaccaccttgaaagatatggctggaatcaagccttaaaacatgtttccttttctttttaaacaacaagggaatttcagtcatttctctttgaaacttctactgtagtaatactctataaattctattttattttgacagataaccaagaaattaatttctaatttcttttttttccctagaactgttactaaactgagtcagaagtttaccaaagttaattttactgaaatccagaaactagtcctggatgtggcccatgtacatgagcactgttgcagaggagatgtgctggattgtctgcaggatggggtgaagagtcttgcttcttaaaatagaagattttcactcccttttctttctttttgtctcattctaaaagggagaaggttgtttgacttgaattggttacagagtatgtaaactaggtgactccttaaatttgcagaattctcggtagtaaaacttaaaccatcttttgttgatcctggctttcactttagctatacccctttttgtgaaaccaaggctcatctatttcttacttctaaaaaaaccgtgggaacttctcagaaggcttctccatagttacttggaggacgggaggaaactaaggtttaatgtatttattttttcattcatttattctttcatttgacaaataaatatatattaaatactttctatctgctagccactatgacagacacttgttttaaaagcacaggctgacctcaaggaattcacagtctgataggagagataagacagtgacctccttggagttagggactgccttggtttactgttatctccatagcacaatgcctggcacatggaaggcattctataatagtttgttaaatgaacgaatgcaataaaaattgcacaagtaactgtcctaccaggtaaaaagctagccttgccaaagacaagtgtgaataaagtggtctcggagaattagaaaacaaaatttaaaaaacccagcaacagtttcttgagtgtgctctagtcagtggtggtttaagcagtgtggcattggcttattttggctaaccctagacttcctagattttacaagagaggactgttgaccctcagattactctgtctctgtgggctccatgacataccaaagagattaaaatccaaggagcttaaaaattactgctcttaggtactcaaatggcttgataaccagcactggactatggtttccagaaggctgaaagtgaagataaaatgctcatttcagcccatccgatggcaattcagtgagatgcttgaagtaagcaagaagccaaggctgcagaggaggcctgagagtgacagtccctgaggagctggggaagaagtgggaggaggcagcctggcaggcgactgtactactttacttgtttttcttctaaaaatatggcatactaggaaaaccaacaagaagtattttgtttttctttgagctcagttttcccattttgaacggacaattttactgtttctcgttgtcatttttaaaaagttaattttttcaatttttggagctcataaccacccttttcctttaaagtggaaacattaatttcagcatgatatgtaagttggattttgatagctgaataatgggttctaattatctttgctgagaatgtacagaattttcagtcccatgacaggtatatatgtaagctctgcctctctctggccacttaggtgcattgccattttattatctatagactgccctctgaaggtcatagtcagtcactgcagtatgttctgataaagatgattatcattcttacggaatttctcgtggagcagaaagtttgctctccatgttatgataaagatgattatcattcttacggaatttctcgtggagcagaaagtttgctctccatgttatgataccagttgcaagtgttgtttaggggcaaatttgaatgctaatagaaatacatatagcaacatgcatcctattttatttgagcacatttccctcttatttgtaaaggttttcaattaaaataacataggatttagcttacaactatggaaagaagaattgaacaaacaggtaagtggaaaggaatgagaaaaggcaaaagtggggagaaagcactaaaacgggagacaagttaaaatttctttttaattgataggtcacgttctcactctatttgcctttaagggaagaaagcaatcaagttaatatgttttccttcattgtatagtatgtaactacggacactattagaggagggatttgtgtagcacttaggacattatacttgataatttccaagggtctttctagatttaaaagtctgattctaacgtagtaataaaaataaaggcccaattttctctttaatattggctgaagatattactctattattgcattaaaattaaacattcacacattgtttgcactgctaaataaaattatgtaatttcttcttctttccttcctccttcctccatccctctctatttccctttccccttccttctttcctggccttttttccttctttctttgttcccttctccctccctcccctttcttcctttttctaaagctggctttgagatcctttattaaagaataaatctttaaaacttatactttattttctctgttgcaggaaaaaatcatgtcctacatatgttctcaacaagacactctgtcaaacaaaataacagaatgctgcaaactgaccacgctggaacgtggtcaatgtataattcatgcagaaaatgatgaaaaacctgaaggtctatctccaaatctaaacaggtttttaggagatagagattttaaccaattttcttcaggggaaaaaaatatcttcttggcaaggtaacacactctgtaaatgcatgttcatgcaagtaaaaatgattatgtggctgacagatttgcgttgttgaaatggagagtgatgattatggtttttgagttcaatatgtgaggatatttggctagaatgttctgagccaaaatagatttcagtagataaccagggaataagtaatgggatttggtgtttaacggtgaagcgttcaccactgtgactcattaactgctttgcttatgaagctgaattttatttcacatcaatttctctggaatcagaagcattgtcatcctgtaaagattactcatatcaaggccaccattgaactctcaaataggatatggatatttttgtaataagaagagttcatgattaagaatgaactcttgctacgcatgttaaaaaaaaaacttttctccaaaagataacacaagagataatgctaggtagaagaacttttataggaacagcttattggctatgtattaaatacatgttttgtattttttaagaaaatcaaaacatgtttagagacatttgcagtacagtagtttgttttaatacaactgataggtcacgttctcactctatttgcctttaagggaagaaagcaatcaagttaatacgttttccttcattgtatagtatgtaactatggacactattagaggagggatttgtgtagcacttaggacattatacttgataatttccaagggtctttctagatttaaaagtctgattctaacgtagtaataaaaataaaggcccaattttctctttaatattgcctgaagatattactctattattgcattaaaattaaacattcacacattgtttgcactgctaaataaaattatgtaagctagaataaagttcagatttaggagacacatagtgacaactgattggtgacagaactaatcctataatctgggaatacggttagtaaagtcaagaattacctttaagtttacacatccatgcacatctaaatctaattgtttaatagaagcagttcttcagttgcaaaggttctttgcagtagaattttctcagccaggaatgatcttcccccagatatttgcatggcttctttcacttagctgatctctgttctgatatcagctgcctagagagaattttcttgaccacattcaaagttagtggcctctccaccttgggtatcatccttttttctctttttcatctttatttattttcattgatttatcgctaactgaaatgagatggcctatttcttgtttatttgttctgcctccctataatgtgtgcttttcagagggcaggtatttatcttagacatcattgagtccgttctgcttaaagcaatgctagcaaagagtggacactggaaaaatatttgttgaataaatgaatataaagtccgtaattgaaaagtcaaattgagagatgcaggagaaaacaaaaagccattttacaggacaatttgaaggatcacagtctgtattaacagttttgccattcatataattcaaatcatatttgattttcaggtttatttatttgaatttaacttccacatgccatattatataggaataactggagaagtgatggctccttttgtctcttagttccaataacttgaaatatttttctccacatatttcagttttgttcatgaatattcaagaagacatcctcagcttgctgtctcagtaattctaagagttgctaaaggataccaggagttattggagaagtgtttccagactgaaaaccctcttgaatgccaagataaaggagtaagttgctctagaattttaggggagtatgaaaaactggattgatatcatctgttaaaaatgctgtttgtttgaaagcctctagttttcaactagttgttagccagttatatctatttgtctagatattaagctgttattaactagcagtcagcagctagtggcttgctttagaaacaaaaatgttaattgcttctcagccttttggctaagatcaagtgtagaaataaaaatgttaaccaaaagtcctttgatccacaaataaaggtagtattcattattcatttttggataacttcagaaaggcaagaatttggtacagaaagaactgtaaccatttatccaaagattgagttttgccattaaatgattttgtgatttataaaatgttaaacttaatctccccaaaatccattttctgtaattatcaaaatttacactttaccatatttaatatttaaacatctctgattggttttataatagtatataatattgatcaattttatatacaaagttatgcatccaagaaaagaaaaatgtatatgtaataattcttcattttcaggaagaagaattacagaaatacatccaggagagccaagcattggcaaagcgaagctgcggcctcttccagaaactaggagaatattacttacaaaatgcgtatgtttttgtaaacagtatttttagtgaattaaaattattaaagagaatgtagccttccccattctcctcctttggaagcaacaagaatgacctgtgaggtctgatctgtggtattgactttaagttccccatactgtgcaaatttttgcagtaaagatatccattctgtcatagtctgtccgagttaaagcaccaaaagatcacagttaaaatcaatgaagctccgaggttgagaatacaagtcaggcttcctcctggagtttgctttttcattgtgatatgcttctataataggagtacagggagtggttgttagagtaaatgcatctcaaaagttggttcaaataccatgtagatgaaacaaacgagctgacctcatgtcttctggcatgagagtagagagtctgtgagaagaagcaaggcggctaaaaactcatgaatgactcagcaggacttagttaaaaaatgcttctttcaggtttctcgttgcttacacaaagaaagccccccagctgacctcgtcggagctgatggccatcaccagaaaaatggcagccacagcagccacttgttgccaactcagtgaggacaaactattggcctgtggcgagggagcggtgagtgtctgcttggtttggtcccatctcatttctgccctgtttgacttgaaatagcctcataattcccctctagggaagacggtaaaaaccaatgtagagatggccttaggaggcttgtttgattagtcacggttggaggggtgtgagaacccagctctggatggctggcatgtggccatgcttcctattcctccagggtggctggtggaagttcagccagtttagtcaacaatatctgagccaactttatatatcggaaagacagaacgaccaacatgtaactcataattcataacaattcataattcataacttcaaatcataatttctgctttttgttcatatacttactttgatgttttaaaaaagctttatctttgattgattaaaattagtcatgctattttagccatatttatattttcaccttttgtaacatgatattattattatgacatcaggaataattggttccctttcgcagggtatagggtacagcacaggataagtattatgttctgaatagtaaaatgactttcgagtcagtaatgccaatattctttacttcctaatgtcactagtatcatacataagattacaggatgaattaaaaatatttttcctataaagtcataattgcaaacaaaattgtctattttatcctttttcctctttttcataatggggagttatttgctgttagtcttcatgtcatacattttttccccaaaggttaagagtaaaaggagagttcttgtgattaaatgtcacctcaattgtttgttgaatttcccatgctgggaggctgcagggatgcaggatggtgtaatggttcaggagtgtatgttccggaggccaccagccaacaaccgcattctactttcactattctttagttgtatcacagtgggaaagcaacttatgtcattaagcttgagttttttcatctgacatttgagaatacaaattataccaccctcatacgacagctgttttaaacaagataatctgcataactcacacagcactagtctgacagataaagtgcacacaaaacatattatttcttattacaagttattactaggtgattaagaaatatctcctaagtaggcaaggtagcaagattctacattaggaaagtcttaaaaacccacaaaattgctcttacttcttttcaattaggatgatatattagctgcaagtgtatacatgtgtatatgtatgtgaataaaaggggtaagtttgtgctattcttaccttcagatagtgattatcaaaagaaaaatggaaagttcaactaaatacacatgggaaacataaaggcagagacatttttgtcctttagaagtgtgtatgtaactggaagcatgtttcaaatagctgacacaaatagctaaatgactatcctcaacatcacatatggaccatctgctactacttgctaaggcttagcccaaacaaatgggtaaatcctggaatttacaatataatgtcacatgatcctacatagcaaattttcctgtaatattaattataaattgctgggcattagaaattattgcagcagttttctgaaaaactgaaccaactttgtgactaatgcccaatctccttacttttttttctcattctcctaaccaggctgacattattatcggacacttatgtatcagacatgaaatgactccagtaaaccctggtgttggccagtgctgcacttcttcatatgccaacaggaggccatgcttcagcagcttggtggtggatgaaacatatgtccctcctgcattctctgatgacaagttcattttccataaggatctgtgccaagctcagggtgtagcgctgcaaacaatgaagcaagagtaagaaactgttacttgctagcatggaaaagaatgacaaccccaaagagtaactgagacttctacctcgctcacctaacactattgggctcactaacagagcgttactcccaaaacacttaaaatgcctttgaaaatagttttgtctcagtgtcttcacagtctcattggggaagcaggtctagaaaaattgacgagggtggacaatttcctgtttgtaaaaataatctctgttgtaactgttattgtgatatgtatttgggggttgaggaaaagtgggcaatctattctgaggaattagagtgtatctttgcagcaaatttgggtacttccattccaagcacaggaaacacatcattgaatctttttttacactatttacactttgaagagaataaccatcttatttaattcaaccatgcagtttgggtgttaagaaatgacatgtacatttcagttcattgtgggagctcttttgtaatggtgatggtcatgcaagtcaatggagcttatgttcttcaaactcccatgcattttaatcctcacttgttttgtaaatagtcttccttcattggaaaacccattcttctcttttttcctctatcacagtctgaggtatgtttcacagtatgataagaatgttgcctgttctggcaagctttttctattgctctggtctactttctattgctctggtctaagtccaacatgaaaggcttgctaagtgagcagtgcaggcaattagtgctgccagtgcccagataaggggtgtgataactggatgggcaggattcggagatctgggtctttgagtgtagataagacacagttaagaagagcggacaggaaaggatattcctgggggatgaggggagattgccttccactacacataagtatggtcaagtatgaaatagtgttttatccacaacctgcacaactccaggctggtggaacacttggcatgctttcagcctcaatctttctactgaaagtactagacaaggtgtgtgtggtcagtctggtgataggttgatggagtaagggtttaggctctgaaaattctctactaggaaggctgtagaaaaatagcattgcataacagacttctcttgtattttgttttgttttaaatcacaggtttctcattaaccttgtgaagcaaaagccacaaataacagaggaacaacttgaggctgtcattgcagatttctcaggcctgttggagaaatgctgccaaggccaggaacaggaagtctgctttgctgaagaggtacatgcagctcatttcatactcaaaatacttgctatggaattttctgtagtggataatgaaaggaagaccctacaaatttataactttaaaatattttcagagagatttaaatttcattgagaagcagattgagggattctataagatttaaaaaataatcacattttcttgcttaatattaggaaaatttataatattaaaatatattaatagaattagtaattttaatttatttcctagtagagaaacccataaagtgaatgtgtaaataattgacggtaatttagatagtttctggcctaaaattgatcaattcagctaaatggattaaaggatttaatagcaaattaattgtgcaaacagagtattaggagtctatttgtagaaaatgtttttgaactcatttagaagcttgcttttgtacatcaacagagtagtatttaggagttattttaattacatagtaattttagctggataattagccagattttctttaaccaggggattctacctaacatttaaaaaaattaccttttttcagctttattgaggcatgattgacaaatacaaattatatatgtttagggtgaacatgtgatgtttcaatatatttatacattgtgaaatgattatcacaatcaagataattggctaaattttacaaatctttagtttgtattgctacatatatttgaatatagcaacactatactttaaaaagatattctataacttagcgtttttgtcaattttacctttctcaccatgtaaaatccaaagacagatatatttagaaatgtagagtttttctataaataatataattagatgcatttgagtgtgtgcacttaccagtatatgtgtgtgtttttggtgggatcaggtagggtgggacatagataaccaaattagataaaactggtgaaacagatttgatgtgaagcatttctgaaaaacatgacacaagaagattaatgttctctaatctgagaagacatttatttagatatagagaacatgaacaaatagtagcagtgctttatctgcaaaccttttaatttctaataacttgtaatttgtagaggaaggggaaagattgagaatacgcattgatttggagattgttatagaagaaaactgttgatgtgaaagaatattgttttctccctggcttttactatcccaggttgttggcatcagagatgtgtttcttcatttttaacttagttaatctacaaacctatgaattcaccccggattgtagagtgttaactgtatgattggtataataatccatttctttatctgattatgtttattcttaattttcagggacaaaaactgatttcaaaaactcgtgctgctttgggagtttaaattacttcaggtaacaaaacattcagacaagcctgaatacaatgttgtttctccagaaatatcaatccataatgagatagatcatgaggagtgccattaattctcttaaaaatacatggaattcaaaaaaaagtttattttaaaaacacttgaacaaaattacgcacacaatgttaaattagtggctcaactatgcaaaatcctttttggttatttaaaagacttcaacaaatgctatcagaagactttcctacgtatccaatatttctctgatataaaataatagaaccagttacttactgcacctattagtttaattagtatttaatatatttttgctcatattgcaggggaagagaagacaaaacgagtctttcattcggtgtgaacttttctctttaattttaactgatttaacactttttgtgaattaatgaaatgataaagacttttatgtgagatttccttatcacagaaataaaatatctccaaatgtttccttttccaagtttgcttatttatgaaaagttatcgataatttctttagttttgtataccattgtctgaagcagattctgttaaaatagcattaagtgttggttattataggagattaaagctatccaaggatggatttacagcactagatcacttggtgaactgaaaaatgttcccaagttaaacactatttgatgctaccagggcattttgtttattaaatgaccatcactgaagtattctaacagataatctggagatgagaaaagaaattattattcttctatgggatctaagaaaatttaacatctactttttttctcaatcttgttcagttctctattcacagacattttaaaacataagaatattacagttttgattgaatataattaatgttttcatcaattaaatttttattccacaaatgtttattaagccttcactgagttccaggccttgggctgggtacagtcactgttctccagtcgcttcagtagagaaggaagcaacacaataatgatgcctcagattatgaccacaaggagttgacaacaaattgttgagggaacgaaagggtgggtgacatcagttctgactggaaaaggtgccataaatgtttaagaagagtcttagaaaatgaatgagcattcatcagttcaagtaaaagagaaggccattttatgaaagaggaaacatggtcagaggtactgggtatgacaaagtatgatgaatagttttagaggagtacagggtaggtaggaagggtagagatgtagaatgttaggcaggatgtggaagctatgaagggctaatccagactctcagcgctctattctaaagaggttggacaatatcttatgagtaacagaggaccacagtgatagctaagcagaggtgtgctattaataattagctttgaggaagataatctatgagatacggagcatgggcaatggggcagggaaaagggtagagggggcaaagtcagcaaga

SEQ ID NO: 19 - DNA, 5833 bp, Human
caccatgttggtcaggctggtctcaaattttttttttttttttttttttttgagacagagtcttgctctgttgtctaggctggagtgcagtggcatcgaactcttgacctcaagtgatccacccgcctcggcctcccaaagtgcttggattacaggcatgagccactgtgcccggcgatgtgggacacattatcatctctgtgagagatttttggtctcttttgtcaccgcccttctctcccagctcctagaactgggcctggctcacagtaggtgctgaatgcatactggttgaattgtaaatgctcaggatttgtttaattaaggatgcaggaaaggtgatataccggtgtgcagaagtcaggatgcattccctgtccaaatcacagtgttccactgaggcaaggcccttgggagtgaggtcgggagaggggagggtggtggagggggctcagagactgggtttgttttggggagtctgcacctatttgctgagtgaatgtatgtgtgtgtgcatttgagagcacacctctgtatgattcgggtgtgagtgtgtgtgaggaaacgtgggcaggcgaggagtgtttgggagccaggtgcagctggggtgtgagtgtgtaagcaagcagctatgaggctgggcattgcttctcctcctcttctccagctcccagcctttcttccccgggactcctggggctccaggatgcccccaagatcccctccacaagtggataatttgggctgcaggttaaggacagctagagggactcacaggccattccacccgcacaccaccagacccccaaatttcttttttctttttttttttttttttttttgagacagagtctcactctgtcgccaggctgcagtggcgcgatctcggctcactgcaacctccgcctcccaggttcaagcgattccccttcctcagcctcccaagtagctgagactacaggcgtgcaccatcacgtccggctaattttttgtattttagtagagagggggtttcaccatgttggctaggatggtctcgatctcctgacctcgtgatccgcccacctaggcctcccaaagtgctgagattacaggcgtgagccactgcgcccggtcaagactcccaaatttcaaactcgccagcacctcctccacctgggggagaagagcataataacgtcatttcctgccctgaaagcagcctcgagggccaacaacacctgctgtccgtgtccatgcccggttggccaccccgtttctggggggtgagcggggcttggcagggctgcgcggagggcgcgggggtggggcccggggcggagcggcccggggcggagggcgcgggctccgagccgtccacctgtggctccggcttccgaagcggctccggggcgggggcggggcctcactctgcgatataactcgggtcgcgcggctcgcgcaggccgccaccgtcgtccgcaaagcctgagtcctgtcctttctctctccccggacagcatgagcttcaccactcgctccaccttctccaccaactaccggtccctgggctctgtccaggcgcccagctacggcgcccggccggtcagcagcgcggccagcgtctatgcaggcgctgggggctctggttcccggatctccgtgtcccgctccaccagcttcaggggcggcatggggtccgggggcctggccaccgggatagccgggggtctggcaggaatgggaggcatccagaacgagaaggagaccatgcaaagcctgaacgaccgcctggcctcttacctggacagagtgaggagcctggagaccgagaaccggaggctggagagcaaaatccgggagcacttggagaagaagggaccccaggtcagagactggagccattacttcaagatcatcgaggacctgagggctcaggtaaggggtaggagggacctcaactcccagccttgtctgaccctccaattatacactcctttgcctctttccgtcattccataaccacccaacccctactccaccgggagggggttgggcatacctggatttccatccgcgcacctagccacagggtccctaagagcagcagctaggcatgggagggctctttcccaggagagagggggaaggggacagggttgagagctttacagaggaagtggacagcatggagggaggtaaggaaaggcctgtaaagaggaggagacactggctctggcggaatggggactattggagggttaagcggatgtggctaaggctgagtcatctaggagtaaacaagaggccttcctttgggaggagccaatccagggtgtagggggcccagagtgaccaggtgcactagggaaaaaatgccaggagagggccaggaagaggacttgttagtagcgactcacttctgggcaggcaggccagccagctagccagcctgctgaggcttcccaagaggggcagagtgctgggatctgggaatccaggaaaggagggaatggggtggggctagatgaaaagggataggtgtccagggagagcctctggctattcctgggaccaggaagttttcactaggatacataacactttttacacactcaccccacccatccctggctttctattcatggaacaacctctctctacaatccctccagatcttcgcaaatactgtggacaatgcccgcatcgttctgcagattgacaatgcccgtcttgctgctgatgactttagagtcaagtaagtttgggggctagagagctgggggtccaggggtggagctaagaaggatctgctccccaggctgggtcagttaggggctcacagtgggatcctgttaggtgtgggtggatgagagtcagggtccatcagtgtattcatttaactgttcatttgtataaccccgtttaagaatactgtcctccaagtgccaagaatggtgctcaggggattaccacctaattgctgactcaagttgctggtttgcaatgggcacagaacttctcttagtaggtggcatgagttgagaaggttctggatcagagataggggcccctctgatcacctccactcctataggtatgagacagagctggccatgcgccagtctgtggagaacgacatccatgggctccgcaaggtcattgatgacaccaatatcacacgactgcagctggagacagagatcgaggctctcaaggaggagctgctcttcatgaagaagaaccacgaagaggcaagcaggggccactggccaggccagggattgaggggccaagagaagtctgggtcggagaatagacaagacaaaccaactgcaagtagccttgctaagacgtttagaaatagcagcctgggctcttcttaaataagaccgttctgatgaagagcattctcagggggtcgagtacaccctggctcacctgaattacaggtcaaaatgatatgggttagaaaatgagatgagaacagaagtagaagcagctaacactaggagctgggggtgataaaggaatgacagcagatggagttggcagcgcttcctaaaagatggtagaaggagcaggtttgtgaaggggagggtggataaaggaacagggtgaagttacagagaaaccatcagtgagtgggtggcatttctacccactggagtagaaaggccagaactggcattgccctgagtgcaagccaaggggttcctcctgtctcttctccaactgtaggcctcctagaagaggcaatcacagaagaaaggccttgttggagctctgaccctgaaccctcctcacttttgcccctgtcacctttaggaagtaaaaggcctacaagcccagattgccagctctgggttgaccgtggaggtagatgcccccaaatctcaggacctcgccaagatcatggcagacatccgggcccaatatgacgagctggctcggaagaaccgagaggagctagacaagtactggtctcagcaggtgcgtgaggggaggggatggctgccaaggtgtgggagggaggcagacggaatgaggggcctgatggactgtccccatcctgcagattgaggagagcaccacagtggtcaccacacagtctgctgaggttggagctgctgagacgacgctcacagagctgagacgtacagtccagtccttggagatcgacctggactccatgagaaatctggtgagtgccttcacatcacctgcccagctcctccttcacttggcctcagacccaaccctgtctcaacccaaatcctatccctcatatcatgagttcctttagctcagaaagagtcagtttcctctttgcatttccctccactcctatcccttatcccagtacttggcacatagcaggtgcccaaaaaagtttccaaaagtgaagggatgagcagtcctgggactctgggctcaccctgcccctcctctctgtgcccctgcagaaggccagcttggagaacagcctgagggaggtggaggcccgctacgccctacagatggagcagctcaacgggatcctgctgcaccttgagtcagagctggcacagacccgggcagagggacagcgccaggcccaggagtatgaggccctgctgaacatcaaggtcaagctggaggctgagatcgccacctaccgccgcctgctggaagatggcgaggactttaagtgagtggggctctcctacccacacgtgctgggatcaggagatcacttctccccaaagtctgagcttttggaagcaccccatgtgtctgttcactggtatccactgagcactgggccgttgctccgtgggtgctcctgtgtcttcaagggagtaacagttacagaggtctcccccttgaagaaagcaaactaagtattgtccctagctgtacttagtatgcaaatgaagtttggccttgagtttcccttttctggaggaagaggctgagggtgatttggagataaaggtagaggtcaggaggctttttccctctacctttcttgtctcccttctactccacggggctgtttataacttgggcttggtcttctgttacagtcttggtgatgccttggacagcagcaactccatgcaaaccatccaaaagaccaccacccgccggatagtggatggcaaagtggtgtctgagaccaatgacaccaaagttctgaggcattaagccagcagaagcagggtaccctttggggagcaggaggccaataaaaagttcagagttcattggatgtcactttgtcttcttttggctgttttcattgtgcacaaatgccctaacccaacagtcccatccctgatccagcagaaaccacctctgacccctgagggtttcatatagattggggtgtagaaggaagagggatctgtattcttggaaacacttctgagagacagaggagggagcagtagatgtgatgggtcacaggctgtggggatccctacaagggaattgtggaatctttgccttgaagcgatctggtgttcaaaaggtccctgactgatcattagcagaaatctgaaccagaggaggaaattaggccaaagacagaggacagaggagacagggagacacatctggccctcccctaccctgctgctttatgcccttggcccactgcccagggcttcccacccacagttttttcctccaaccccaggccatactcatcctccaaacctatggtgccctcaactctgttcattcactcaacggagatatgatttttagggtgctagaggtctggctagaagttgagtaaatgatcatggaagttcccatctaggaaagaggtgcccctgagtaagcacccgtataggtaaggatgggc

SEQ ID NO: 20 - DNA, 196597 bp, Human
ttggtgtgcagcccagaaatgtggcaactttgggttacccaaccttcctaggcggggaggtagtccagtccttcaggaagagtctctggctccgttcaagagccatcacagtcccttgtattacatccctctgacgggttccaataggactatttttcaaatctgcggtatttacagagacaagactgggctgctccgtgcagccaggacgacttcagcctttgaggtaatggagacataattgaggaacaacgtggaattagtgtcatagcaaatgatctagggcctcaagttaatttcagccggttgtggtcagagtcactcatcttgagtagcaagctgccaccagaaagatttctttttcgagcatttagggaataaagttcaagtgccctgcgcttccaagttgcaggagcagtttcacgcctcagctttttaaaggtatcataatgttattccttgttttgcttctaggaagcagaagactgaggaaatgacttgggcgggtgcatcaatgcggccgaaaaagacacggacacgctcccctgggacctgagctggttcgcagtcttcccaaaggtgccaagcaagcgtcagttcccctcaggcgctccaggttcagtgccttgtgccgagggtctccggtgccttcctagacttctcgggacagtctgaaggggtcaggagcggcgggacagcgcgggaagagcaggcaaggggagacagccggactgcgcctcagtcctccgtgccaagaacaccgtcgcggaggcgcggccagcttcccttggatcggactttccgcccctagggccaggcggcggagcttcagccttgtcccttccccagtttcgggcggcccccagagctgagtaagccgggtggagggagtctgcaaggatttcctgagcgcgatgggcaggaggaggggcaagggcaagagggcgcggagcaaagaccctgaacctgccggggccgcgctcccgggcccgcgtcgccagcacctccccacgcgcgctcggccccgggccacccgccctcgtcggcccccgcccctctccgtagccgcagggaagcgagcctgggaggaagaagagggtaggtggggaggcggatgaggggtgggggaccccttgacgtcaccagaaggaggtgccggggtaggaagtgggctggggaaaggttataaatcgcccccgccctcggctgctcttcatcgaggtccgcgggaggctcggagcgcgccaggcggacactcctctcggctcctccccggcagcggcggcggctcggagcgggctccggggctcgggtgcagcggccagcgggcgcctggcggcgaggattacccggggaagtggttgtctcctggctggagccgcgagacgggcgctcagggcgcggggccggcggcggcgaacgagaggacggactctggcggccgggtcgttggccgcggggagcgcgggcaccgggcgagcaggccgcgtcgcgctcaccatggtcagctactgggacaccggggtcctgctgtgcgcgctgctcagctgtctgcttctcacaggtgaggcgcggctgggggccggggcctgaggcgggctgcgatggggcggccggagggcagagcctccgaggccagggcggggtgcacgcggggagacgaggctgtagcccggagaagctggctacggcgagaacctgggacactagttgcagcgggcacgcttggggccgctgcgccctttctccgagggagcgcctcgaggagtggctggcctggacccgcgagcatcagcgctcagaccgggtccgcgctggggctgtccgtttgcgacaggatcgctgatcccttatccagctgtcgggttggggtctcactgccgaggccctgggcactaggagcagcacgcaccgggacctgcctggcacccagagcccattcccagaggacctggggcaggtacgcagggtcccccggagccgggagcagaggctcctgaaagcctgccaggctgcccggggctgggctgaggccgggactttggtgatattgggcactggccgcgacctcgcgtcacgagagtgtaggaggggagccgatttggaggggactcgtgcctgcgggggagcaggaggatctcaggagagggccagcgccggcatcccatgacccgcttgagtccccaagccggactgtcccggggaacgctcggcgagcgcccgctcctccccgccgctctcggaccgcggggccccagtgcgctgcgctcagccacccgggtggggcctctgccgggagcaggcgtggtgcgcggtccagtccgtgtcgcggacatcagtgaccctgacccacaagggcagcccagggcccaaataccgttaacttactgacttacaagcctagcctttaaaatccgagcgaagagagggcgggcgattttgaccaaacgatgtggtttgaggaatcgatgaggtccgcccgccacctaagtcagccttcgctgggcgtttgggagacgggcggtggaacagtcaggggccgggggttttaccagcagttagaccgccgccattgaggggtcaaagccccgaggaacttgagggttcggactcgcagtctctgctcagtggggctgagtggcggagatttgtgcctcgttcccctgggcgcagagagccagatttcggagcgcctttcttttaagcatcgtggagaaaaggtaaaatatgaaataaaatatagtaatataaaataagtcattgcaatgattcccgggaagaaaagtcaataggatggagcgtagtacaacaacaacaacaacaaaaagcttgttaaacccaaaaagcagtaataattaaatattctttctcagtgggaagactaactagaccgtcagtttccaagtaacaagtaatagttccaattagattggagaaactactaaacccggagacagggcgaagtggtaacttctgagaactcactgtaggttgggaaaggtgctaacataactatattaaataaaatgttgtattttctatttcacaaatacattttttgttttgaaaagtcacttgtattaaaatataattgcttagagaatttaaatacctcactcgactattatgtaaagataaatctagctaaattacatgaatctaaaattacggagggaaaagtacgtgatttattagattttctgcttcacataattatatctttattttgaaaacatgctgactttagtgaagcatcgttttctttgtaattggaagcatcttagatcagtggaaactttacagaaatgtgagtgggatcctcttgtgatttttcttagattataatttacttaaatggggcagcagttttgcaactctgaatttcttttttttttttatttgcacttttttgggaagaaaggactaacattggcaagctgagaacctctttacctaacagttaacagaacactctgttagttcatgttagctcagtcggcatcatgggtgcttttgaaaactcatagtttctctgtctggttaacaagcatctcacagtaaaacaatcagctaccgcctactttacaaaccgcatcagggctttcatgctcaactgagaggctgcatatccgggaagcaatgtctagtaagaagccacggttccccactgcagagttctcttgcgtcattatgaacctgggtctgccttccttcaggtactatgtaatctttgaatacttatcagctattaatattctgtgtgtgtgcatgcctggtgtgcacatgcattgagaggtaaaataaccagaggctcagtattacaaaaagataatgcctttcccctctaaagcgcttatttacctcttccagacattctgggaaataaaaagatgccaataattcagatactttcaagtcctctctattgctctttctctataaaggataccagtcctctttctccagctctgagtctcatttcttacttttaaggtatcacaacctggatgaaagctacagacctttttctttgccctcatttttcttgagttcttgaacagctaacatttacaatttactataactaagtggaaatactgaaattgtgaattttgtgaaggaagtccatattaataatattaaatcaaagtgcacatgaaaatacctatttcaaattgaatgtaataaatctcttataataaagttaattttttgtaacaatttttgttgttttctccaaggttttatgaagctgcacttttttttggtctaaattgcatattcgaaatattaattatttaggagctttggcagcctacagttttccaactgaagcatcatgttacaaaggaactgtaggtgactacttactccagttcctcaaatattgttgcttactattttagcactttgttacatttttaaaatttccctgttggacattctataataggctatctggtttcttttctaacgatcaccaagtgggtactttgttttcgtatgtaaaatgaagacgttagtataggtggttgatttctaaggcccttttctgactccaaaattcaatgaatgattccaagaaatggcctgaacaccgtgtctgtctttctcttttctcttccccaccttatttatatttgtatatagagtggatgagaaaccatatgatgctggggctgttaggatgaactgggtttcccctgctaatcacattaaactttctttttctttagtagcatgtacctaaacagccagtcaatttggccttgaataggctgttttggaagagatgggctggtagaggatgcctgagccagcagtcatctttatcttgggcttttttcactagcagaatgtataactctataaagtagatgctccctcaaaactctagttgcattaactcttctaaggatagcagtcattttaaacccctatttatttcttgaatttttaaagctaacacttatttgattaacagaatggctttattcttttaaaaaaagttccagattttaacagggatactaaaccccttatttaaaattgagtctactttacgtgacttttaagaaacaaaccaagtaattactttgttctttccaaaaatgatcgagacatttctaagtctactttaaatttatttaatatggaagttgaaggtgatgtgttaccaaaaaatggtttcatattgaccaaaataatgtaatgtcctcgaggaaggttatgcagcctattgagatctacacagcagagttatggctgatatttgacctggcttgggcagttgggcaagacaagaacaaataacagagtaagtagcttctgtagtgctttaaactgatatgtgtatgtgggtggggataagaatggagaaaaagtgagagaagctatcttggcacgtgaatgttaaatgcgaagcctgctggtgttagtagaggccaggcgtgtctaattcttggtttggatctcacagttaggggtgtgttgggtatcaagtaaatatcatcatttttcagtgcatttgtcattgcaggtaggggaggaagggcatttgaaatcataccagacttttttttaagtaaaaatatattactgtgagtagttaaaagtatagaccatctgtggcatttggtttaagcaatttggtagaaccgaacagtccattctgctccattggccttcgtttataggagaggcttgtaagaaatgacaagatctcctgccagatgctttccaggatcactggtggttcctcacactcttgggtgctgtggaaattgcatgctgctgattaaattgctggattttataccagattgagggaggggaaggaaattggaggaatggggtatttgagggagggcttgaaaagaaagcctctgacttagctcacggggctgcaggggggttcattaaggaaacagttgcattgagtctgctgaagatagtggactagatttcctgcattgccgctggggcggatgtggggagatgtcaagaattcctggggatttcccatccatcttggtaaagctggatgcctgaaagctgtttctgattgctgctcctttcctcaattttgagctctttgaggaacttgatcttgtctcacagatacacacacacgttgtaagagctagatggaacctcattgacccaatctactcatgccagagatgagaaaaccggcccagaggaggccagtgctgtttttcaaggtcaacagctggctagcggcaggcctaggaacagaacctgatgttcctgctacagacaacatctcttcttcactggtgtatttcctcttccccagacggaagacagatgttcaaatatttattgactaacattattacagtgctaaaatttctttcgaaatgacatctttttaatatgaagttttcttctattttcttaacgcacataaggggtttaaactaagaatcaaaatgatggctgcttagtagcatgccaagagatttgatgagaagattaactttccttacgagcacttggtatccttttcctgaacagctgtggcttacatacttgtggcttatggtactagctttgtctttcgccacttctctccacacacacactgggttccagctacacaaactctaccctagtcaaacaaattattcccccttcttcagaggcgccttcactttcatcactctgttcatgctgctcgtctgcctgcaagaccttttccctccctctgtgtctcctcctctcctgctggcaagatccagcccagtaatcaccatctctgggagctcctccttgtagctcccagacagcacttgccatttcttctgctctcctgtagccctgaggtgtactcctccttcagtaattctcactttgcattgtcaggattttatgtgtctgtgtcctttctctttggtagagaccccatgtcttagctgtccttagaccgctggcacctaatataaagcctagtacagagactctcggtaagtgttggaacgaatgagtaaatgaatgaatatgtggccacactatcatttcgcagaagcaatctcagacacaaatttattccatgagtttattccagtatagtaatgtgctcctgcctgttcatttggcctcatttacaagggattacttaaagtaactgttctcaacagataatatttgtcctcttcagtgagcgattgagatgtatgagatcagctatgattttcaactctttgagaaactgtctcatgtcctcccctcctgtgtgggcatgatgcttcgctggggcctgtgagccaccaaagccaggctctggtcactgcagaagtcctgtgttagcctctgttggtgaggtgctaagcacctcagccttttcctgcagcgtgttatacaatttttagagagaacagagtcctcaaattttagggtttgactttcttgccctctcttaaacccaagtccttgggtgctgggctgagatgcatacctgaatgacagaggtctggccacagtcagaatcaactctgttttaataggggccttggttacaggaccacactggtctgtctaacttcctctttctttaggatgaggtttcctcaacccttcatataaatgggttcctggcaggactaccctgctaggtgcgagacatgttcttaaaaattggaatcccatggcttgggctcgagctggtgcctccctatcctcacccccatcccggcccacactgcacattcccacatcatactccaaaacgtgcttctctctgtgtgctccgaggtccagcaacatcagcatcccctgggaacttgatgactcagagcctatactttaataaaatccccacgtggttttgtttgtttgttttttcattaaaaatcgagaagcattgattttagtaaaggatccaaagtcagttctggtgtcagggtccatttccttttttttgagacggagtcttgctctgctgcccaggctggagtgcggtggtgcaatcctggctcactgccacctccacctcccaggttcaaatgattcttgtgcctcagcctcccaagtagctgggattacaggcatgtaccaccatgctcagctaatttttttgtgttttttgtagagacagggttttgccatattggccaggctggtcttgaactcatggcctcaagtgatccacccgcctcgatctcccaaagtgctgagattacaggcgtaagccaccgcgcctggtcccatttcctcttcactaacaccctagtgatgaactttgacgtgtgtgactaagggactagacctgggccagccaggaacctctctcttctggctcccacgttggtctcatgccgccttctgctgggacatcggtgtcctcctccaaaattctttacaaaatcttgtacttggcttagacttgtaatcaaagtaaacagaggttgtggtcttgaagaataccatggttaaccaaatcatgggtggcgagatcaaggtcttggaaaatatggatttggtggaaaatagtaaaaatgcaattaaatagccaggttttcaccataaagttctacaagccttttgcttttgaaagaaaatgacttggtggcaaaaaccagcagcggtaagtatcctgcagaatttttggttgtcagggaggtgtcattgtctcgctgcattgtgccgctgccgatcacacatttcatgtgcctcttactgtcttgaaatggaatgtatttgcacttaacattcttccttgtcatcattgccagtcttgacaaatgcttttaccttttcacagattatcacggtgctcacaggcactttttctcagcctggtcttctatccttctatttaatgggtggagcacaaatggatttcctctcaagccaccgaaccacccatgtggactacacaggcagagctacaacaattatcagattcttttgttaaaagaggcctgaagtgaacctagcataaatgaaaagccttggctgttattatacacaaatataaaaccacttaaactcaaggccacctgtagcaaaaccctaattaggaattagtctgccaagtgatgtctatgaaagcctttgcctctctctagggccgtggtccccagcctgggctctacattagaataatctggagagcttttaaaaatcctcgggtcttggctgtacctctgaccaatttaatcatgagctcttgagagggacctaggcataggtaattttaaagctcctgggtgattccaatgggcagctgaggttaagaacctcaaatttcatcacacattagaatcacctggtgggcttgcaaaactagctggctgggccccaccccagagtttctcattcagtaggcctgggatagggccaagaatttgcttttctaacaagttcccaggggatgctgttgtgcctggtccagagatcacactttgagaacctctgcccaggggccagtttgagaggcctggccacatgggaggcacctgcccaaatgccaatctgtaaaaggcactaaatcatcactagacatacgacaaggtggaagaaactatttacgagaattcctgccaggaagagtatgtgctagtagagtgtgcaagaaagaatacttagatcaaatgccagggcattgaatcaatgagtctagattaaattgccttctgaggagagggggactgttttgccgagtgaggtacgtacgttaggggcagaagtgaattgcccgtctagactaacaatggtcctccttctctgccttatgcttctgccttatgctgtggagtgctcagtcttttctctatgtaaatattggcaaacaccatactattggcctgtcccgggcacccacgtgccttggtccagccctggtttcctccagtatgactgcaaaatttcctctccatccgggcctccgtatctgcatttccggtgctgggatcagtatggctcccacttgggtggctgaattctatctgttggaggcagggtggcctcctaactttcatgatgtgccagggttctgtccccactgttgtgaaaagctactgctggttggagacagagctggcctcccatcgtgtgaaaccacggtcctgggaacacttcttgtgaaacaccaagaattcaaactgcttcccccttcctgggggcatccagggtaacccgtacaacatgtaattcttaatattgcgtgagctccactttggtgcttttattttcaaatacagaaagagcatacacttgaactaccacacagtcactgtttctacaaggctgaggcacaatagccatttggatctgccatctatttctacataacgagatgtgccaaaacttagtcacccaacacaacaatgcattatgcttcatgattcttctagacctttgggctaggctcagctgagtagtttcccttcgggtctcacctgggtttctcatgcatctatagtccttggcatttccactgggtccttggtgctgggcctccctcttcatgagatctttcctcattcagtagcctggccggggcttcctttccctgggggcagcggtgttgcaagagtgtgatggtggaagctgcaaggcatattgaggcttaggctttggaacgcctacaacaccgctctaccacattctattggtcaaagcaagcccagctcagatgcgaggggtgggaagcagatgcctctctgcgtggagaggagcacagcctcacaatggaccacaccattgtgtaacacttcatgtttgcttttcagtctagctattaagctggagtttggccaagaaaatacagtaaataacttattatagtaaataacaataaatgctacataatgtcttgacccttctaaacagtatctgggagtaaaaataaataaataaataaataaaaaataaaacaggccccagagaagagctttctattcttaattcaaattttgttttgagtacctgacaggcatgctgggcagcagcctctgatgactaacatgacaccagcaagggaggacagctgaccccaagattctgagtgcaggcagctctgcagcttcttggggctcttatcatagaggccctgatttagcacctttttctggaggtgccgagactgcagggacagacatgctttggggaagggagaaaggaggcaaccaaaccctactgactatacaatcaatatatgtaattgatttacatatattttttatttcaattatatatttattaggcatttaaatattacagacaaatatttctttttttatactttaagttttagggtacatgtgcacaacatgcaggttagttacatacgtatacatgtgccatgttggtgtgctgcacccagtaactcgtcatttaacattaggtatatctcctaatgctatccctcccccctccccccacaccacaacaggagttacatatattattttactcagtcccgagaggtacggtcctcttaaccatgcaaaaactgatgcttaggtaaattaaatactttccctaagatcacagaagtggtaagtaaacttggaattatttgaatctgagtctatcagacttgcaaacccgacatttagggatcctcctaccatgccttcaagcctaaatgaaaagaggagaaggaaaaagcatcaaggggactgtgctagtctttccctccttctgtccttggagtttggccatctccaaagaatgtgagaagccactgctactccagcttaaagtggccttgggagattccactgctgtatgtggcagacactgttcacatctccaataagacagaattttaatcatgtgagttttcttatcgtaggcattcaaggacctcccaaaaaacttagtcagaaaaggagccccaaagccatcaaggacatgattttatgtgggcttccaaactgctctcctagatatggctttaaaccagttcagatgacaaacaacagcatgaggacagcactttattctagaaaagctcatatcaggcaggtccgaggaaaaagctgggactgccctctcacagatggtttccaggaatccaacgtgggctcctctgcacctttcagattccagaaagctcacagcttttccagaatgaaactaaaatacctcacagaacgacctggaagtgtgtttgaccctgaaggcagatgctacatgaattggataggggaggacattaactgtcccccagggaagggaaaaaaatgtgaacatgtcagcacagggcactttctgtgttaactccatcaagtctcttcctagccacctactgtgcacacctgtaactttgttttatggattgaagccccaaggctgaggaaaccctgctgacttgctgagggccatccatttatggaacagccaagccaagattcaaacctaggtctttttaattttgaaatcggggactctttccaccaacatttactcaaagtatcttgaatgattaaatctaggaattaaagaaaaaaggcaagagttttgttttcagggtttggaataaaaaaactgtcatatttatgagaaaagacaaccatccaagagcctttttcttaaacaagttactgtcagtcactttgatttccctgtttgattggcagtccttgtacagtgagcaacacggggagcatttctttaagccccgtagctcctgtgtctctccctccttcttagatcattcctttaacatagacctgcaagaagtcaagaaggagaaaatagcgttttccttcttctttcttgacctgttactcggagaaggacactttttcaaccagaatactgtcatgttaccagaagctgagaaaaatcctatcctgccacctattgaggagttttatctttcactccaaagaaaaagctggaacgtttggtcaaatggatacatgctttagatggaaattatacggaatggtgtatatactatgtaaaaatatgcatggtgtctatgtatgtaaaaatccactgttggatttttatgattgttttctttctctaagttggcattagagaaaccaaaaatgtatgtaaacagatggggaggcagggatatgctagagaggattacaaacaaacagttttaaaaggcagtgtaaactctggcaacaacactgcatctatgattaatggtattgttttctttttggaaaacattgtttaactctctttttccacttaatgtctcctgctagatcagatttttgttcactgctgttctttgaaaatttttatggcttcagaatcctctccataaggacttctggtagaactagagaaaaatatatgtgtggaaatagagtaattgcagtgccctggaatggactttgagtacctgtaacttcttgagggttaggaaatatttgacacacattgttgatgtacaagctaaaagtggttcagccactcaagctcccatcccatcctctgtcttcaaaactggtcaatgaaaaataccctatcaaagtattcgctacgcaaagtcacttagaaggcaaatgggaaattcaggaaactaacaggagtgaattttcaggaatttctacttcactttagccttttgagactgacattaaacttagtggttctatatccagattatcttttcttagagggagtaaaatcctaaactgtagaaataaagtttgcttggttgttgttatttcttaaatgcgctttatagtccaaaccgatgggcatggaattgccttgctggagtaattcattcaccattttgggataatgttaaatacaaacttaggaggggaggtttaagaaatattcctcttccaatgatttggagggctgtattttcttttctttttttttctttttctttctttattattatttatttatttatttattttgagatggagttttacttttgttgtccaggcttttttttgagatggagtttcacttttgttgtccaggctggagtgatctcggctcactgcaatctccacctcctgggttcaagcaattctcctgcctcagcctcctgaatagctgggattacaggcatgcaccgccacgctgggctaatattgtatttttagtagagatgggatttcttcatgttggtcaggctggtctcaaactcccacccgccttggcctcccagagtgttgggattacaggcgtgagccaccacacccggcgaggtctgtattttctcccacaactgcatgaggaaaaacatgagccatattaaatttaattctcctgatcccgattttatagccagtcattattctagattcatgccctatttccaagctgagttcaggaatgtgtagaagatttttattttataacattttaatacattcatttaaaagatgctcaagggattatcatcaagtaatccattatattttattttgaggtatagatatggttgtattcattgtgttacatgtttatcattgaataagtgttcttattttgtgaatttaactgagttttactaagataaatcacttatgttggtgaagaatgtgtgacttcctatattaaaggatgtgttccttaaagacatagtgtacatagtttgcaggagatctctatttgttgacttagattatcttccatatttcttagtattcacctattctacttctaaatgacagcccctaagaggccagcttagagctgaaagaccttcaagaggaagaaatgtttctgacccatctttgcaattgtgaatccagtacagtgcctggcacataatggtcactcaataaatactggctgaactgactgaaatcatatcctgagccatttctctgggtctgaggcccttctaggagtcatggttcctcattggttcaccttctaagtacgtgtatgtgtgtgtgtgtgtgtgtgtgtgtgtgtgtgtgtgtgtgtataagcggaggaggttaggagaaatatggccaggagctggcaacaattctcccaatacacaggcaatattctgttccttccatttgggttatcttctaggtccagtgaccattttctcatttttggctaagctggccatgttctcctgactcgactgtagactcaggattgagaatgaggatctacactgcccatcttctagagaattgcttcccaggagatattttccttgagatgagccttcctgctgggagactgttaactggcttaggttcccaaacagcacagaagatagttgattggaacctttaatttctaggtacaccaacagagcccgagtcactaggtaatgttactattgctgccattgttttgtcacctggaatgagaacattttggttgaaaattatttcctcttggctctgggtcatgtgtggtactggctaggtgacctgccaaaaggaaggacacgttaagaacatgaagtcctggctaacgcatcacatctgacagtcctcattcattccctcattgctgagtctccaccccggtcgtcttccgtggtgctctgttttaacaagcacaacgtgacctgggtatgtatctaaagtatgattacttgtggcttttttcctagtggcaggtgaagtcaggtagaccccagacaaaaaatatgcgaaccacagcattgaaagaagatgatagagctttctcctcccagcacagaggctgaggaaaacaagagttctaagaaacaaggaaatgtatgtgaaactgttagaagaaaacacttgtttaaaaggaaagatgaagcttagagggtggaaagatgtggaagtctttgaaggagaaagagaccctgctatttcttttagcaaatacacattgattcttcaggtctcacctccaactttattctaatagaagactctcactccctgggctgagtgaggtacctccacacctggcacttccccatgataacacacaaatataatgtaattttctatttctttaagcagaaattatttttatgcatcattacatatatatctatatatacttatttatctgttgtccatgctaagctataaacactgtaaaggaagcaacctcgtttgtcttgtttattgttgtatctctatcggtatacgttcaaaaaattaaatgaaagaataaatgttgaggttaaagatggaaaaataaacaaggtaagggagtgagagaaaggggtcatatagagaatgtagtgaggggaaaaaccaggattggtggcagtaaaagagagataagaagcatagctaaatgaggatggagttcccagactcctgggattgcacctaagagtccaacccttaactcagttcatcagtctcatccaaaggaggtggtggcttaatttcatgggagcagcttcggcattgggcaccttactacctctccacagagctgttccttttggttttatgtaacttctactttggttttggttttgtcctacagaatgagctgattcataagttattttaaagctgttgggttggtggccaactgataacagaaattgttgtttttcttctatcagagatataatgtcttggatgatatttttaaaaaagctaatttctagaaataaagttctagatagagtaatgaaggtgtatgggtatatatcccctgagaatgaaaaccagcattccccaggcattgaatacaaacaacgctaaagtcttctatgggtatttgtaaggaaggccttaatatcacatgccgaaatgagtgaaaaacattcggtaaattatttcttttaaaaattcagatactgctggtgaaaatgtactacttttaatggattacttttccttccagaaatttgactctcagcaaaacttgtataacatgaattccatctaagataagatttttttaagtttttgaaatcttaggaaagcacagctcttacaaatacttactacgtgaaggatatcttaagaaaatgtgaaattagaaaaacccagaataaaaaataacagtttaatcaacatgtccaccccatttccgaagcatgattaatctccaaaatatgtgtaatgaaaggcaattatatttcaaattgtttaacttagaaggaaactgattatgacaatagaaaacacaatcatcaagaatgtgtttaatgagtcttagaaatttgctaatgtagctttcaaaaactcaattcccctatgatggataactttattgcacactcttggccatttaaatctcaaaggtcagagggtttgtatatattattggttgcaaagatagagatcttctcaactttcctgttagtgggtgaatttaaagaataccctttatgaacagtctaaaggactccagaaagatgttttctatataatttggacttcataaactgtatcaaagtaagctgaaaattaacatcagaactttatcacattcggccttccaatctcatttcatctctcctccatttttatatacaaagcaaatggtattctgtcattatttgtaatcgattctgaagctgaaagtctgcatgaggagaatagataaggctttgtattgctataataacatttttggcttttctggcatgaacagctacagtgctaaggtgcacacttgtctgtctgcctgtttgccagcctttcttattcattttattatacaaaaatgtgaaggcactatttgggaatcaaaatagaaactggaacaatatgcattttatggtagtttaacagcatcacattacagctccatgacatattcatttttttccagaaggaactgtgtgtggatctgaagattatgtcacatgacaggttataagacgtagttgaataaaatttaaaagttccaattcccgcttttatacttaaactgttacatggcaagctcctatacggaattgatcaaatatctcccagatcttttctgtgagactttccttctaagggaacccacagggatccacataaatgacaaatccataacattgaaacatgctgtcatcatctctatagatgcctggaactttgacactgaacagtaatgaaagcagagtatttggtaaaatatctggacatagaccaaactgtaatcctgatgctatgtaaaacagaaaactttccattttagattgcgagtcacatgcattccatgctatgcttccaaactggtaattgtttatttaaagagaacacggaggatgcctttggcagaactgaaatttgcaatcctaaataatttagagattagaaatctaaagttaaggcagttcaagcatgttattagtactactagtcttaataatacaactctatgcaaatgctcttgcagctaaaagcattttgtcactgatcagacactatgattctaaagaggatgcacaaattgataaaaaattaacaaactaatttaaaaactcagttactttcactaagccacctgtatatttagtctcacatacattgagtgtgtttattgaaatggcatctccactgagcaatcagttgtcatgtctcttccaggtgttcacaatctgaaaatgtgtatatttcagcctgaaacaacttctgagtagcataacactactggcaattatgatccattctataagacgtgacgtcagagctcagtttcctctcagacctctaaacagtgacattggataagaacataagcccgtggggagtatgcttcaaatgtaaaagtgtcctgccactgatagagaaaacagagatgtgtccaagcccttcctaacagacaaaacgttcctgtatgcatttttagggtgtaaagagtgttttctctgttcgtgtccatttgcataaccagacgaaggtctaccagacttctctaccgagtattttacgagttatgtctcgtgccctgtcaaccagatcttgacctttgccctaggcagctcagataactttcatgacatcgtatggtaaactgaaatgacatattgttagacagctctatggaggtggtttttgaactcatttaataacagaccagcggtgtaggagtagagcattttttgggaaaaggtaactccttggtcagcaggagatttctcccaaaccaaccttaattaactctgatgtcacatgaaaaggagttgtgcatggctataggtcattggaagggtaggtccctgatggtagcctggtgacaggcctaatgatcaatgaatgtgccctgttaaactgtgaccctcaaagaaggcagtgtcaagtaaaaagctcagagaggcatgcggaagacatgtttccctcataaacatagacagtaggaatgttgacgttattagagcattttttcctggtaaacattttaaaccacacagatttttttccgtgtaaataacttttctgaagcttaaggaaaaatgagtaaagtcaatgacccatgtatggatgggatgaaaactgtccaagttttgatgattttagactttggccacttcagtggctaacactgtgatgtcttttgtgccaagagctacaaaacctatctatgagtttcattgacagacaattaaaatatgaattgtaagacagccttaaaatgaacaaaccagagcagaattattgaaatgaacataattgcggagaagtgccaattccagttgctggtgttaaacatttaggtaatttcttgatttattttttgacacctggattcaagacataaatgctatatacgtgactattttgaattttctattcagactttgagatcagagacttcacatattgaatctaatagtttgaggattacttagaatggcaaaacctctaaagcaagaaatcagtgtggtaaaatagtgcgtttaatatactataaagatttaaaggaaaaagcaggttcctaggattagaaactttctacaaactaaatataatgttgctggacagcagctgcctaaacattcagtcctattgtggaccttaaagaccaataacacaattactctaaaataaaatattacatatttgtaaagttgcccatgtaaaagtcacaaataatcttatctgcataagggattagtcagcagtgagtcacagcttcatactcttgccacattcaagtcaatttctaaatccccgcctagaaagagctttccctgagcctaagctgaatgaaaaatgtaattaaagcacacaccaaaaacctcttctagttctacatcaacctccccaccaccactcaaacaaacttgacgttctcatggagagaaaagtgtatgcatgcgtgtcagcaagcgtgtgtgtgtgtgtgcatgtgtgtgtgtatttatgtgcacattctttcatttctttacattctttcttgatttaaggccaattgttttggaagacaaacctgacattttaaaaattagtatcattgctaactgtgggactgaaaaaatatgctttcagttcatacgaatccccatgactttcacatcttctatttagtctgttggtggatggaatatgaactctctggcctttctccatcattctggaagtgagaggagatgggacattataatgctcttcatcaaagcatgggccctgtcagcatagctggtagtgtagtctccatttaatgtggttactttaatctaggcattcacttataatgcccacttcatattatctgataaatacttggatagagatatgacacagaggttaagaactaagagttaacttttttttattaagtttcagagccctataagaataagcatcgcaaataaaaatgttggtagcgtccggaaatttgcaattgcattcttaacccttctcccatccttgccaccaaccccaaagattctatgagatttagtctatgagatttcggcctttaataagctacatcttaaggaaagaatattttctcttattgtgaattatgcttaattaacctcgaacaacctttgtaaaaggctcatgatcttaaattcaaattttagaaacatgatacttagggatctctatttagataaagaggccatttatcattcaggattatgtactactgaaaacacagtatgcaaaatcaaagacagatgcatttcatttcaaataaacggaatatacagagctttaagttaaaaacaaataaattagaaataaaaaattgatataaaaggaaacaccagatttattcagagtcctagtgacataatttgttaaaaatttccatttaaatagggaaaattcaaaatatgcaattaggagtgatttaaaactaacactaaattaaattgaaaagattgtaacgggggagggaacagcaagttttttgcaacatgtttgtaaacttctactattaggtagtgatgttacagaacattaagggaaaattaggtctctaaaatcagccttctaaagttttaagctggaaaaacaactagtgtaaaatctcacactgatggggtaatatgtggcaacaaatttcaaaataactggatattctaggccttcaacataactctgtgattactttagtcatcagttgctgggtttttaaaaatagcagctttattgaggtaaatctcacatactataggagaccagaatatgacaccccaaaatatgactgtaagagacaagaatattaaagtatataattcagtggtttttggtccattcaagagttgtgcaaccatcaccattaatctaattttagaacattttcatcacccccaaaagaaacccaatactgattatcagtcaccctccatcccctccccgcaagccctggcaaccactaatctaccttcctgtctccaggatttgcctgctctgaacatttcatataaatggaatcatacaatatgtggccatttgtgactggcttcttttacttagcacaatgatttgtggggtttgtgtgtgtgtgtgtgtgtgtgtgtgtgtgtgtgtgtgtctgtggttgttttgttttgttttgttttgtttttgagacagagtttctgtcgcccagggctggagtgcagtggtgcaatctcagctcactgaaatctcctcctccaggttcaagtgattctcatgcctcagcctcccaggtagctgggattacaggtgcatgccaccacacctggctaatttttgtatttttggtaaagacaggatttcaccatgttgttcaaactggtctcgaactcctgacctcaggtgatacagctgcctcagcctcctaaaatgctgggattacaggcataagccaccatgcccggcctgttttttgttttttaacaataaaactagaggaatttattttctcataattctggaagctggaagcttgagatcaaggagatcaaggtgctggcaggtctggtttctcctgaggcatctctctgtggcttgcaaatagctgctttctccttgtgtgcttacatgacgttttctctgtgggccagcataatgttttcaagatcatctatgtggcagcacatatcagcattcctttttattgccaaataataccacattgtaaggatctgccatattttatttacccattcatcagatgatggacattgggttctttctttctttctttctttcttcctttctttctttctttctttctttctttctttctttctttctttctttctttctttctttccttccttccttccttccttccttccttccttccttccttccttccttctttctttctttctttctttctttctttcttttctttctctctctctctctctctctctttctttctttctttctttctttcttttgagatatagtcttgctctgtcacccaggctggagtgcaattgcgcagtcttggctcactgcaatctccgcctcccgggtttaagccattctcctgcctcagcctcccaagtagctgggactacaggcgcgcaccaccatgcctggctaatttttgtatttttagtagagacggggtttcaccatgttggccaggctggcctcgaactcctgacctcaggtgatccaccctcctcagcctcccaaagtgctggggttacaggcgtgagccactgcgctgggcctgggttgtttctttttggctgttataggtaatactgctgtggacatttgtgtgtaagtttttatgtggatggatgttttcatctgtcttgggtagatacctaggagtgcaattgctgagtcatgtgtttaaattatgatcaactcttatgtttaaccatcgaggaattgccatactgcttgccaaagtgggttgcaccgtttaaaagtcctacctgcgatgtaagagggttccagtttctccacattctcaccaacacttgttcttatctgtcttttttatttaagctttcccagtcggcatgaagtggtgtctccctgtgttttttatttgcatgttcctgatgaataatgatgtcctttatcttttcatgggcttattggtcatttatatatcttctttgggaaggtgtctattcagagccttggttgatctttaaaattaggctgttgtctttttactaaccataagtatttctaaaatgtgatttctaacttatacattgttatcaattactgtgaccccaggatcagaatttttagctggaaaggatcctaaaaaccgaaccctaatctcctgtgttgacagatgaagaatcggaggcttaatgtggcccgcccatggccacaacagaactcacaaatggcagagctagggagattaatgactcataataaaaaatggaaaaacacagatgtttcatgaattatattcaaataaagctcctttcttacagagaataaccctaagacttcaacagaataaggggtgccaaggtggcatctggtgggagagaaaccaggggatttgtcttgaagttgggttcgaccagctagaacactgtttatttagattagtaaaaatagcagttttctaaacatactcttagtcagactttacagactttacattgagagtcttgagttttacaagtgacctcaaggctgtctggttcataatgacctccagtgggagttggctcttttagtatccatcatggcagctttgaagagcatttgaagaaagagcctcaatcatctgggctttggatttagttgcaaaataaagccatcatttacttggatatgtattcactcttcccaatgaagtcaaagaaaacattccattttgcctaatgaaactaaggtggggaattaggggtggcattttagaacactctacgtataggctttctatgtgaggtctagcatgtgcgaaaggagagaagggatttgtgtcaaagagtcataaagttctgttccacctgccagataatacagaacagaaaaacaatgaagaaaagactcagataagatcaatacaaagtgtcagtgttcaaataagtccacgttcacatgttggttttttaatgctattagcctacactgcttgaccttaacagtttttctaacaaagtagcatgggataaagcccattttcatgctctatgttgagtttttttgttttattttatttaaatgttttcgtgatgtaaggagatctgtatgcctcttatgattatattgtaattgactttgatgaaaacagtagttcacagaagggacaagatcatttattgggaggacaaaaatcattcttttaaatcagatttctaggctgccatgtgaagcattagaaagttctcatctgcatctgagattcattgctaaattatagcactccacccttgaaaatgaaatagcctgtaggtttgttatgtaaatgggcaacatgactctgagctactgagacgatcaagctgacttccccatgctatgactatgcatgtgtttatgggtacgtacatacacatctatctttatataaatcactaataagatgggcaagtgtctagcatgcagtagatgctaaaacaaatgttgaatctttgttactcagataggtacatggacatgaaactgcctcaaagaaatgtgttaaggcctaataatgtgaattcaaaacattcaagaaataaatattttcactttccctttttcttattcgttttcctgttaaactataatcttgacacctccaataacctttatgagattctagtttcctattaactgaaggatagtgatgcactcaaagtcaccagttacttggaaatttgttccttatacttctgtttacctgtgttttggttaactgttttttatctagcttcctcattccaggtgcaaaatacactgatgttactggagacaaattatgtggcaacgcttttttttagaataaccccatttttgtcagtgtcttttaaccactcagttatgttgtcttctggttgggggacagcatggggagtgtggacacgaacaagtagagggcacactgtctaagagatcttctctaaatagcacttcttgcgcggcgcggtggctcacgtctgtaatcctagcactttgggaagccgaggtgggcggatcacctgaggtcaggagtttgagaccaacctggccaacatggcaaaaccccgtctctactaaaaatataaaaattagctgggtgtggtggcaggcgcctgtaatcacagctacttggaaggctgaggcaggagaatcgcttgaacccaggaggcggaggctgcagtgagctgagattgtgccattgcactccagcctgggcgacaagagcaaaactccatctcaaaaataagtaaataaataaataaatagcacttctctcagctgggctttgggtggttctttgaagttagcggtttcctctgatgagggtcaggagtactggtgttctaagttgctgataaagaaagattcatgtggtctggaaaccaagatgtaggcagtgggatgtcacaaacaggggaactgcttcttttcctggacgggagcgctcagcatctccagacagaccacagagataactacaagtaatgccagaagtttccacaggaagcttcgatggatcttttccagcacatgaacaattgctcaattaaatccccagagttccatgccataaagaagggcagaaactattctggcatggaagtttctcagggcaggtgttatccattgctggctgtggctttagaaaagtctggcgtttccacagatccctgattttgggccacatgttgcctcaagaaactcataaagataagtatgagttaaaatacattcctaggtacctgaaggggttgacttgatctaggaggttgtttgatagaccaatgggatccatatgaaacagggattttaatttagttaatattcagccattttatttaggagtactttgataccgggatctactgtctgtaaaaattacttttaatatattaatttaggctgggctcatgcctctaatctcaacactttgggaggccgaggcaggtggatcacctgaggtcaggagttcaagaccagcctggcaaacatgacgaaaccccatctctactaaaaatacaaaaaattagccacgctgatgatgcgcacctgtagtcccagctactcaggaggctgaggcacgagaatcgcttgaacctggcaggcagaggttgcagagtgagtcaagatcgcaccaaggcactccagcctgggaaacaaagtgaaactctgtctcaaaaataaaataaaataaaaatttaaaagatattaatttatatcatcagcaataccagaaaagcatatgttaatttagtatctttgaaattatatacccagcaaaatattctgacagaagcagggggaggggaagtgattcccctagatgttggtgatagtgggcatctgccacgtgccaggcagcaagccagcctcttccacagcacagcaccgaatgcacacaccctgcctgtgaggtggctcgtaggctttccagttccactcacgaggagcctgaggagcagccaattaagtgatgccaaggtcatgcagtcagtaggtggaaaagctaagcctcaaacgcagatcttctaactgaatccagtttttgagatagtcaaatccaagagaaacgctggagaggactgctgggcataaccagggtatttgacacacacatcatctcacagatctgtgacctaatggtaaaccctccatgaccattcacttagagcttctacctttgcttccactgtttaaactgattttttaaagaaaactataccctgagattggtgccaaatactaagttttcctccctccaagaatttctttcctctctcctgctaacttctattcccgcctaaggaacgctaatcctgggcccctcattccctgcctttcggaggcattgcagctgcctgggaagaggggaggaggaggaggctggtgaagaagagggagaaggagaagagagactgagggatgaggggaggaaggaggcgagagagatccttagtgatagtattctgattggtcagtaatagcttcaagggaggctcagcctctgtagcacctatggttcaaaaaatcatgaggctgtctgttaggctgttcttacattgctgtaaagaaatatctgaggcttggtaatttattaagaggtataattgactcacagttctccaggctgtacaagcatggtgctagcatctgcttgccttccagtgaggcctcagggagcccttactcatgtcaaaggcaaaacaggagcaggtgtatcacatggtggcagcaggaacaagagaaggggggaggtgccacacactttcagataatcagatctaaacaacagcaccatgccatgcatgagggatccacccccacgacccaaacacctcccatcaggccccacctccaacattgaggattacaattcaccatcagaattggagggtcagcatccaagctatatcaggctgggactgtgagaaatggaaggtcagagatttcaaggtcgtctagtccaatctcttttttacagataagataactgagatctggaaagagagatgacttgtctagggtgatacagctagtcactaaaatggatgtcattattgcatcatatggagatgtgtagattttaaagcactttcaccacctcactttattgcctcacaacaatcctccgagatgtttgtcgaatgtcacgtaagcgtgtgaacagttcccttttgactgtaccattgtagagggaactcatagattacgtaagacaaaccaaatgtcttctaaaactgattttgattctataattagttttccaaatgaggaaactggttcagaaagggaaatgattggccaaaaatatcattgctcaactaatgattgcatgaaattcagagcccaggaaaatttctgtactttttattcagaaaaaaagatgagacaggcctataggactagatgacccacactggaaaaagttcagtattgaaaatatattttggatgacactgacatttattcttgagagtttttactaagttattgcatatttgaatattataactagttatatattttaatataatttcattgaacctatatgaatccattaccattctacataaataggcttttggatgttatttaggtcatttggtataaaaggatatataatatttatgagcaagggtagagctagaaaaaatttgtgaattaagagaaatttgtattagtgtatcttttgcttataaattaaagatacaagtaaattaaagatgtaaataaattaaaaatgaaaaactcaccttcatggaaagataacttaaaaaaaggtaagaagacaatttacaaataatacattttaaaaatttgtttttcaggatctagttcaggttcaaaattaaaagatcctgaactgagtttaaaaggcacccagcacatcatgcaagcaggccagacactgcatctccaatgcaggtaagtggctgtgttggtttgggaataatctagttgccatgcctaaggcaaaatcattccctggcagagtaaaaaggtagggacctcagtgatctcctgtgatctgcaaagtgcaaaccataggcatccagcttcccatgaaaggggattcatggggaagggagagcattactcactcagggaaatgggggaagggatgcccaaatagttctgcatctttattctgagtattgttctacagcttttctgaatgtgttgctttcccgtaaagaggaagatgactacacttaagagaggacctccgcttcctaataaaatgaatgctgaggaactggtgctgagcctagggcccagccataaatatgttttgttttcttatctgtgattgcaggggggaagcagcccataaatggtctttgcctgaaatggtgagtaaggaaagcgaaaggctgagcataactaaatctgcctgtggaagaaatggcaaacaattctgcagtactttaaccttgaacacagctcaagcaaaccacactggcttctacagctgcaaatatctagctgtacctacttcaaagaagaaggaaacagaatctgcaatctatatatttattagtggtaagacttccattttctacattctgtttgcttttgctttgcaaatgagtcataaatctaccctgatccattggaaaggttgctttcctagtgagtatgaaagaaacgggttaggaaagagattccatcctagttgtagacactttcgtggatgtcaattttaaccagaattgtcaaggcccagttagtcactatgtgctccacaaagagagagactggtctgtataggtcacctctgtacccacagctcctagcacagtatgtggcccatagttggatgaataagtgaataaaaggattttagttctatttcttagttattgagaagcccaaaatagaatacatgatttttgtcatttaacacagctgcattctcttatatgttggaactgtaaaatactgttgtttctactaaattaataaacgcaatgttgctgttatctcgagtgttatataactggttccaatggacaatgttgtattatttcatgttcactgaggaactactataatgacatgagaactggcactgaccaagatacagtgcaaagggcaaagggcaaaaatgaatcatgtttgattcattttttatggtactcgtaaaaaaatcattttcattcattcataatttttatgatactgttcttccttccttagagaatgaacaaatgaagtaacattcaaaggggagaaatgcaaaatcttttaagaagtagaaactcacagtaaaattggaaccctgagaaagaataataaaaatggcctgtcactttcttcttccttgtttagttccaattttcaaatcttgaggggattaaagaaaaaaacgcacacacacaaacaaggctgtagagaacacaaagcaatattagtaggcacttcaggcacagaatcaggtttaaaaaaaacaaaagaaaacaaccaaccatcagcatcaatagctaaatatacattgtgggtctaccttctggtgaggtcaggaactgggtctttgcattggaggtagtacaatagaactaacattttagtgaggcagttctttttcgttgttgtttgtttgtttttttgagatggagtcttgatctctcacccatgctggagtgcaatggcagctcactgcaacttctgcctcccaggggcaagcgattactcctgcctcagcctcctgcgtagctaggattacaggcgtctgccaccactcctggctaatttttgtatttttagtagagactgggtttcaccatgttggtcaggctggtctcgaactcctgacctcaggtgatccacctgcctcggcctcccaaagtgttgggattacaggcatgagctaccgtgcctggccatgagattttttttaatttgtgaaataaggcaactagacagtgtttttccctgagcataacatgtacatatccaaattcaggattagtcttaggagacagcagaacagttgcctgttattgacagtaacctctttgtagctgctatcagcctgattttgactgagccactttcatgtccccgatcctccaaattctgttttgacattttgtgcttgtccagggggtagataactgtaagggactaaccatccaagcagtttgccgtcaagggatgcaatcagctcacttccacatatgagtgggaggtaggccggggaattttgcttggggaagtcagcccacttctaaagcagggatgaaaggatggtaggcaggaatgaggaagggtagagaaggtgcagcattaagagcagagactttcagagaggtaattttgcagctgagggggaaagacaacacgcttgatagtggtggaaaaagccatgtactcagccatctgttctctttctctaattccacgtagcatattgtgttctttccgacatctgtggagaaaggaaaacactgcagtgagtcacagactgcccctgtctctataggggagtgggagaaaaatttattcattctaatattttcataaaactttctcctataggtttatcagtctgacttgcaaattgaacacttaaatgaataaaaagaaaaccatctctttttttctaataaatagtgttcagctattttcacctttaactcctaaactattcaatagacatcatggctttatgaagccagggagtgcaagcctctccactcagtcccctactatcacaaaggagagacactgctatttagaattagttccatttcaactatacaacagagcagatctggcaaacaatcatgactttgagtgtcaaatccattgttaatctaagccctgtgatggcacggtccatgtctgtcctggttacttttatctgcaatgtgcctccctggtacagtgccttgcacatattaggaaatccataataattgctaaatgaataaatgaatggattaacaggtgctttgtggaatactatgttaaaattgacattgaggataaattccaggcttagtgggaaaaagtgccatgattgattattgatgtctcttgtgggattgtcggggagcagtggccgttaggtcatgtatttatcatgtctgccttcctgtaatagtccacaaccattcgcagaaaattacaagttccaatatcataaaacacttgcataatttgttggacattaggaaattatctatcacttagattgtttttggataaggaaggattgtgaaatgcgttgtatttcatagattattatggaatacacacatatacatacatacatatactacgaatattatatgagcttggtggaaaaattgttatgataatattatgagaccactatttttaaatagcactgatactaaaagatattggaatcaataatggtaaccatagaagagccttctgaatcttgtttgctaattaatttaatcagcaaatatttaggaaacagttactatgagcctgtaactgtactactatgaacagtaacatctattttgttatttgtttcctgttagggtgatattggtctcataatcacaccttattaaagtccaaggtagctgtgatataatccattaaacaatcataacttttccgaggagtctaatattttatgtctctctctcattattttattaactctctttctgagaaaatttgatcttctgcttccattgttaccgaacacttccatgacaggtttattttagttcaggagcacaaaacttatctctgatgactcagagcattgtctctggcattaataaaactccaaccatttcctaatatacagctgtgattactcgctagatattaacttggttatcatgtatttattattgttgaatatttactttagaatatgtttgggggatttcagccccaataagcatctgcagattattgggatttcattttatttttctctaaggatgagtaaccctatgtaaacacatcttttgaaaaggtagatttgtagtctaatagggttttaagaaaaagaatcaggagtatagctctgtctacatgtcacaaaacccagcatgtaaattatgaacaaactcttacttaggcattattgattgcctgctgtgtaacaggcgctgttcccacctgagcactgattaggatgtaacatctgatatgtaatgtacagaaaaatcaatatcagcactttatcattccagcttgtataaatccaccaaacctctagcataatgtattaaatcaatttaagtacccaagtaattatatttaactactttacttaattaccgaattatctagtaaatttaaatttccgctaatataataatttcttacatttgtttcttttcacttaaacaaatggtttcatttacttgatgccatttaatcctcacaaccatccaatgaagcatcgttctcttcattttacaagcaaaggaccaagaattcacttcacattagggctctgtggggagtcatgggaaagtgctcgcactggaataaggtggtcaggttttcccttcacattctcagtggcaggaggaggtcggaaggggcaagactgaggcaggaaggccagataggggcctgctctgtgcatcaaagcaggtggaaggtggtgtcctgagttcactttggtcgtggtggggaaggagagttgacagaattgggggattcgttggccttggtgatcagaggttgagtggctgagggaaagaggggaatcaatgtgacactcagaatcctggaaggggccacttggtcccacagccaggtggaggtttgccacactaaattaccttgatgcaaaggcaccatcattatcatcattctctctggatatacccttggtatggcttttgaatcataatagtggaaaatatgatatgcatttgtaaaaattgctttgttaaaaatgaattgaatctaattatagctacgaaacaccaggtcataaacaaaaacaaattacaaagcacctcctaattacaatagagtacaattcttctattaatttctagaagaacagtaatgttggggccatttaagtgaacttcatccccttggagagagaaaggagcacttttgcacttcttttctgacactctggtgtacacaggaaatgggctccaggtcagccttttctcacagttagaggatttcattgaaaatattattgtaatatatgagttatgactgtaaagtaagaaaactgaccagacgagttttttaatggcatctctgaagtagttaacacttgtcagtatctttaatttagttagcaagaccttaaacttagggtgttgagctccccacactgtgaagttagcttatatctctctctcaccagccgtaagcttctagggcctatttaaatataatatctcctcttgaaaaattacaatcgaaaagcaaaatgatggggctgggtggatcccttctagttcatccctgtaaaagaaactcatctcttctcttctgtttctctttacttgattattttcctctttggctctattaaagtcaatgggttggagcatttttataagaaatttttccgcagttgattttcccatatgcataaaactcatgagatttgcacagcggcataatctgaggtagaaacattatcggacacattgggtatataactgaaagcagtagaatttctaacaacttagatattctgggagagaataataattatgcttttatataaatgtgtttagcgggggaaaaaaaggctctacctggctatgaaaccttgagcaagtagaaatcctaccagtgcagatattctgaggattctttttttattcttatttttacttttattttttgagatagtcttgctttgtcgcccaggctggagtgcagtggcgattctgaggaggattcaatgaactcatttgtactgaacttcagatttccttaagagcttttacttaattatctctgagagaaagggagttggtatttcttccatgttatatatgagaaaacaacctcagtgacttgcatgagctggacagagctcatacattgagaaaccaggatgaggatccagctaggttaggtctatttcccctgtactggagttgcagctcttgacatcaaactacgagctagttgttgttttaattgttaagaacatagattatacagttattaaaattttgtaatctcaaatttattctttttctttaaaggaaaaatttactaagttgagcagggcttttaaaaatgtgcctccaaattcattaatgggctatggaatcaaatgaatgggtttcaacctgcattaaaaaaaaaaaagctaggagctggggcatccacctgtagtctcagctatttaggaggctgggacaagaggatcacttgagctcaggatttgaggctgcagtgagctgtgattgcacctgtgaatagccactgtactccagcctgggcaacgtagtgaaaccctgtctcaaaaaagaaaaaccaacccagaatagaaaagaaaatatccaagtaaattgcaaagagtaagggtaagtgttgtttagtaaaactatttttgtttcaattttatacattcatatatccattttaccctcataaatgtaaagtacatacgtgcgtgtgtgtgtgtgtgtgtgtgtgtgtgtgtgtaatgggtctgacgtaaaatgtatttctttttgtgaaagttagcataataagtttaaaagttaccaggatagaccatatctattatttaggtaagcagtgccaattgtaagcactgtgattttttgggggggtggggtggggggaggggcacaccagtactgaaacagaggtctggagaaaatgtggcagtggaaagaagccctctcctttagctgatttgggtccactgcttttggtggttctgtgcaatccactcatttcactcctgaactgagttttcccactcggaggcttggcccaggagtttccaccaacaggaatctgtctgcagatgttgattacatacctactccacacaaggccctgttgtttgatctgtgagagacataaaaagcaaagtcacagaatcctgcaattgtgaagtcccccagttactctctaggaccatagctcacagatttgtaagtattttttaaagcatgagttttattttttagagaataactattgttcagaagtgggtctctaaggagtgaagagggctctgttaatagcccctaatggggagccctattcatgttctgtgaggcgtggctgttgctccagcactgcctgcctttagatcccttcccagatctgacacaatttggcacacacagaaggctcagtcaacactgcccagctgggtgatggttgggcagatggtgtttgttgcccaatctgccagactggtatggcaagtccaataaacatctccatggaaccagcagggacatcaacagagtagcaatctgcaggcttcatcgccgagccttgccgcctccactttccccctgtggggatcagaaggacccttgtaagatggaaatgcaccaggaatgtgggcccttcatccccagaccgaaagaaggtgttcacgctttcatgcaggtcagcactgtgttgggcagagagcagcacatggctgaacagattgccaaagcttcaaaaatatgtcaatggaatcactataatttcatgagagaaactttaaagagaaaatattgtttctattcatcaaaattctcctccaagggaaaataggcaaaaacagtttacattttgcaggaagaaaacaagaaagcgcccaaaataaaacccaaactcatagccacactagttggttgaattttttaggcatagatttcttaggaaatccatgacgttatctaatattgcttggttaatgtctagagtcttctctggttttaaatttccattttccacatggcctcattctctcctccacctgcccatccaaagagcttccctcccttactcatctcacctctatccctaacatgtggctccttccatgtattttctgaaatgtgtgtttcttctaacactaatcttccagtaggaactggtttccaaagttttgatcaggaattgtctagggttcccaccatagagtcgcttgagtccctgcattaccaggaggccacaagtgcagacaggttgggtgatggatcctgtttttcctctcacatccctactggatgcatttgctcaggagacaggtgaacatgttggggtgaacaaaggtaggactctcagtctctggatgacatgtctggaaacccaggtgagattcctaaaatggcagcaacctgagactgacgtgcatctgcagaattatccttcaaattctctaaagaactcctaggaattttctggcccatctgcacacatcttcatcaaaaacctagtgcaaggtcaggttttgctggatttattttttcattttgataaagatgtgaaagaggggaaacagatatttctagggtttaaaatacacactgatgatgttgtttgcaatcgcagtttttttcttgggaaatagacccctctacatcctggctgtgcactccttctagggctgaagtatgaaggagattattcattctatccatcactggcagacagctgattaggaccacatggtgagagtttagagaacagtaacttaactcttaaccattttcctttccagctacgtggaaattggatggaagacattcttgatatctttaagccctgacatgtcacatttcccttctaaaaacatttctgtcattaaacactaagggagcttgactatagaagaccctgatatatgattgggacagaagccactcacattggtagacttgctggcagtcaggaacaaatgcatcttctctctttggcccctgccccagaccctgtattctcctaggatgtcctaataatttcatccttagcacttggtgtgtggacatgtaaaatgttcaggccattccctcagagagaaaacaatttctggggctctctaaaatccataccagaaaaaatttggcatgccatccctctagagccacattgctaagacttactagcaacgacgcagttatacatcatcaggcatttagtagaactatataagtactcaaaaataatcagaatgaacatagtcctgaataagccacttggacacaatttaaggctttgaaaagttgatgactgtggtggaattatgaaatctaaagatgggccgggtgtggtggcccatgcctgtaatcccagtatttgggaggctgaagtgggcagatgacttggggtcaccagcctgacggacatggtgaaaccccgtctctactaaaagtacaaaaaaattagccaggtgtgatggcgcatgtgtatagtcccagctactcgggaggctgaggcaggagaatcgcttgaacccaggaggtggaggttgcagtgagccaagattgcgccactgcactccagcctgggcgatagagcaagactccatcacaaaaaaaaaaaaaaaaaaagaaaaggaaagaaaaaaggaaaagaaatctaaagatggcaatgaagtccaaaggtaataaaattgaccatattctctcatttttcccctacaatcaagaagtgtgaaaaacaattgatcaaaactttatggttttaaggattttaaaaactctccctcaagtgatcttttaagaaaaataagcaagggactttttcagaagaaatccccttaagctgaaaaggctttaagtttctggcatttcataacttcaacaatgataatgaaatgcttgccttgcttggagatgaggaggtgatctgtttttatctttatggtccttccagttctaatattctacagtttttcctttaactatttaaaatatttgttgtgtgtcatttgatgtatttttgctgaattatgttggctagctgattgtgttgttcaaaataggtagcttactaaagcagtaaacacccctcccttccttccttccttcatcaaatgtcaattaataagctacagttgaaacaacatgatccaggcttcagactgctttcaaatccctgttcggatactcactaggtctttgactttggacaaattgcttaataaggagaatggttaacatttaggtgggtcttaatccatgctgggtgccatcctaagcactttgcattcattaacagattttatccttacaacaaccctgtgaagtagtgctctcattttaaaaattagatgtgtgtgcatgtctatgtgtgtgtgtgtgtgtatgatttttttttttcctagagcagtttcaggctcacagcaaaattgagaggaaggtacagagatttcctatataccccttgtccccacatgcatagtcttcattatcaacattccccaccagaatggtacatttgtttcaattaatgaacctacagtgagacatcataatcacccaagtgcaaagtgtacatgagggttcacccttggtgttggacattctatggattggagaaacatacaatgacatgtatccactattatagtaccatacagagtattttcactgccctaaaatctactgtgctctacttagtcatcctttccttaatcccaacccctggcaaacacctatccttatttttctttctttttttttttttgagagggagtctcatcctgttgcccaggctggagggcagtggtgcaatctcagctcactgcaacctctgcctccagggttcaaacgattctcctgcctcagcctcccaagtagctgggattacaggtgcccaccaccacacccagctaatttttgtatttttagtagagacagggtttcaccatgttggccaggctggtctcgagctcctgacctcgtgatccacccacctccgcctcctaaagtgctgggattacaggcatgagccactgtgcccggccggcaaacacttatctttcttactgtttccatagttttgccttttccagaattcatgtagttggaatcatacagtatgtagccttttcagattggcttccttcattttgtaatatgcatttaaagttcctccatgtctttccatggcttaatatctaatttctttttattgctgaataatattccatcatataaatatttttatattcatagtttatatatttttatattcattatataaattcattatataattatattcatagtttatttacccattcacctaccaaaggacatcttggctgcttccaagttttagcaataatgaataaagctgctataaacatccatgtgcaggttttgggtggatgtaattcttcaggtcctttgggcaaataccaaggaacatgattgctcaattttagggcaatagaaaggctagttttgtaagaaactgccaaaccgtcttccaaagtggctgtctcgtgttgcattcccaccagcagcaaatgacaattcctatcactctgcctccttgccaacatttgctgttggcagtgttctggattttggctgctctaataagtatgtaatggtctctcattgttattttagtttgcattttcccaatgacatgacgtggagcaccttttcatatgcttatttgccatctgtaggtcttctttggtgaaatgacccattttaaacagagttgtttgttttcttactgatgagttttaagaattctttgtatgttttggaaaacaattcttttttcagctgtatcttttgcaaatattttctcccagtctgtgccctgtcttctcattctcttgatgttgtcttttgcagagcaggagttttgaattttaatgaaatccagcttatcaattgttttgtagatcatgcctttagtgttgcatctaaaaagtcattgtcataccgaagttcatctaggttttctcctgttatattctaggagttttatagtttcgcattttacatttaggtctctatgatccattttgtgttgatttttctaaagagtgtaaggtctgtgtctagcctcattttttgtttgtttgtttgtatgcagatgcccagtttttcagcaccatttattgacaagatgatttttgctcctttgtcaaagatcagttgactgtatttatgtgagcctatttctgggctctatattctgttccactgacctatttgtctatccttttgccaatatcacactgtcttgattactatagctttgtagtaagtcttgaagttaggtagtgtcagtcttccaactttgctcttcttcaatattatattggctattctgggtcttttgcctctccatataaactttaggatcagtttgtccatatccacaaagtaacttctgggattttgattgggattgcattgaatctgcagatcaagttgggaagaactgacattttaacaatattgaacctttttatccaagatgaaatatctctccattcatttagtttttcttcagttttgttcatcatagttttgtagttttcctcatacatatagattcttatatatattttgatagacttatgtctaggtgtttcacttttgggggtgctaatgcaaatggtattgtgtttttcatttcaactctactagttttcattgcttgtatataggaaagcaactgacttttgaatttaactttgtgtcctgcaagcttgctataatcttttactagttccaggggtatttttgttgattctttttgattttctatacagatgatcacatcatctgtgaacaaaggcaattttattttttcttttccaatctgtataccttctatttccctttcttgtcttattgcatgagttaagacttccagtgtgatgttggaaagtagtagtgagagggaagatccttgccttgatcctgatcttagtctgaaagtattatcacagtcatctccatttatttctcagaaaggttaagtagctttttcaaggttatataactagtgtatggcagagatggcaacaaagttcttgcctataaccacctcccataatcaagagtgcatatgtgcaaaacatttaggacggtgtttggtgtatagtatgcactatatacgagtttattattattaatactaccactcattattaccattttttgagcttggttttctcaactgtaaaatgagaagagtattacttcaggggctattaggagactacatgagacaatacagactgcctaacacttaggaggcagtagtgattggtagtaatccctgtgtgtgaaaaacaccgtgctggacacagtaggaagtacaaagatgataccaacaacttttaaggggcctgcagtttggtaggtcaaagaaaatgagttacaattaaccatactggggaaagagcagtaagaggggtgtggactgggggtgctctgcctgggacattccacccttccccactccccccacccagctcttctgtaacagctcactcttcctcacttttcaggtctcaagttaaatatcccccctctgggaagcaccctaggcacccccaaactcgggatggtgctcctactgacctttcacacaggactcacctctcacaagctctacggacaggactgagttcgtcctgcttaccatgatagccccaggacccagcacagggtatagtacacagaaggtgctcagtaaatctttgttaaatgaaagaaacatgggatttttaagtatattagtcttacctgacttccttgactttaaaaaggaaattgagggcacattgagaaaatgagacaaatgtgggggtcaaaatcatgtcatgtgactaaatcacgatcccaaaattttccaacaaactagagcagtgaacagggattagcaaaatgagatttaacaggaatacatgtaaaggcctgtatttggcttgcaaaacccactaactaccctagtactggatgggggaagccattgctgagacagcacacatgcaaaagacttcagactttcagttgactccatatttaccaagagaatgtatccaaccttgggatacattaagaaatatgtagcaccctgccaggcgtggtggcttacgcctgtagtcccaacacttggggaggccgaggcaggtagatcacttgaggtcaggagtttgagaccagcctgaccaacatggtgaaaccccatctctactaaaaatacaaaattagcccggtgtggtggcacatgcctgtaatcccagcttcttgggaggctgaggcaggagaatcacttgaacccaggaggtaaagcttgcagtgagctgagatggcagcattgcactccagcctgggcaacaagagtgaaactctgtcagaaaggaaaggaaaggaaaggaaaggaaaggaaaggaaaggaaaggaaaggaaaggaaaggaaaggaaaggaaaggaaaggaaaggaaaggaaaggaaaggaaaggaaaggaaaggggagggggagggggaggggaggaaaggaagaaatatatagcaccaggaataaaggtagtgccagacttaggtggtgccagacttgctgtttagtttacacctcaagagggacattaaaaataggaatttcaagcaaattattaatccctttacacttcattgtcatcatctttaaaatgggtgcctgcctcatagggttgtgagcatgaagtaatttgatgattttattattttcattggcaagaagcaattgaaaggacttaaatatttaatctaaaaatataaagaactgggtgggaaaataggagacatgagtgacagtctcattcaaagttctcttatgtgaaaaagagattaagcttcgtctttataatcctagatggcagaacaactatctaagaatttcagcttgacttaaggaaacactttctgacatgcaaagctgtcccaaagtggaaggaaggaatgtcttgggagtgattagtccccacgcatctaggaagcagacactcacttgatgggaccagatcagatgaggcctcaggacctttcctctgctgggattcattaagcacctggtgtaggtcactatcgtttattaatgtccggctcaggcttgttattaatacatacatcatctcatttcatcctcgaaacaacccaataagagaaattcctttacagaaaagttaaagaaattcaataccatgtttaaggctgcatacttcgtaaattatcctgtcaaagctttgggctcaagtctggttgactccaaagcccccggtctttctaacgtgtccttgcctgggctcccaccccaactccctcagaactttgtgtgcattataaaatgggagagaagggacaggagtgcatgcagggttgcaaactggaagtatgcaggctggattcagctggcacacatgttttgattggcagacacagcacttttagctgccaatgcttaatagctagaagagttcacgtaaaaatttcatttcctacttatctttaaaaactggaaacactagccacactggcgcatatttccacttggcaacaatggactgcagcaagcagggacggccccttcaggcatgggctcacgttcccagctgccacaacacctcctgtcccacctccagttcctccactcgtgtgtctggcccccggagggatgtcagtgtgctacgcccagtgtgaacatttcaaatgaatgcataacaaatcgcgagtttaggaacaggaaagtgcctgtcccacattccagatgaggaagctgagccctagagagtcccgtggtggcgcaggtcatcagcgcagcacttcgacacagcccgactcctcccctgactcctgcctcccctcaactgccctcctccaccccgacccgctcccctcccccgccgccccgcacacagctatgctgatggaatgcatcggggctgtcctctcggaaaacccactgtccccagtgtccctgctggagaggagtctgaccaggcatcctctgcccctgagagggaatttcctccccaggctccagaaaacagggcttgctctggtgtgactgttggtttttgttttgttttgtttttgttttgagacgaagtctcgttctgtcacccgggctggagggcagtggcacgatctcagctcactgcaacctctgtctcccaggttgaagcgattcttccacctcagcctcccgagtagctgggactacaggtgcctgccgccacgtctagctaattttttgtattttagtagaggcggggtttcaccgtgttgtccaggctggtctcgaactcctgagctcaggcagtcctcccacctcggcctcccaaagtgctaggatgacaggcgtcagccaccgtgcctggccaactgttggttctgaggttgtcctcaccatctcctaaaaagtcctcagcaccttacagcagagagctaagcagagggtccaatgactgaagcttggtttccgcggtgagtcttcatcagtccgttgcttcccatttctagtccccgtcagaaggccccatgctacccctgtttctgggccctcatttctcccactgagtgtggatatttgaagatgtaattgtcacgcttgagtcattgaggagtgtcagggccagattttggtgtggtggagggagactagcctcagatcaggaagcgtaaattcagtttttgctcagccattaattgtattcctgtgcttgtgggacagtctctcctctctgggcctcagttttctcatctgtaacatgataggcagaattagggcatcttaaaagtcctttgacagttttataatgttatgattcagaggcagagctgggaataaataataggacttgggacatggccaaaaatcttagcagtagaagaaagatttatagtaatccattagagttccttgctttttctttttcatttccctccctcccttcctctctccttccttcttttctccctctctccctcctttcctccctccttcccttctccctttctctttttcttctgagatgtctcaactgatcaagatgaagatctctgactgaggtcagtcatctggttaacagaacctagaaaccgccagccagcttagtgtgaaaacccagagagcacagaaagctgagacattcttaatcttacagtccatcaagcttaaatctagccagcattccactctcactgagatcttcaactcacttactcagatcttagctgtaaatttttaaaatgaggtccctacttcccttcaaggcaggtatcagtactgtttcctctaatcaacatgagcattcttgtgtgtgaggtgtgtgtgtgtctgctcagctagactctgaggactggagtccagggactgtccgtgtgcacagtgctgggtacataatacgtcctgatttcacctttcttgcttgcttcaatcttatatcttctccataaacatctgttgacagtgtgccatgtgtccgcctctgctggacattggattgaggggaatcggttttcctgatcccctgccgctagacacccacattccaaagagcatcccagggggcttaggcgaagccagaggaaggagaaaaggaaccaccactcctgttcctcctttctaattcttctcctttgctctgctcttgctgttcgatctgctgttataagtgaagcaatgcaaaacaaacaaaacaaaacaaaacaaaaagcaatgtctttcttctgaggaaaggcaggtagtaggcaaagagctcttttttagaaagaggcacttcttattttttaccacacaaataatacatttttaaatgtttcatttcagaatggcatcttgagtctgaaacacaatgacttttctctaagtttaccctgctcaaatagaaatatttgtgtaacatgtaagtgtctgtctggatggcagaaactagcaactgattttctgatattcctaagccagtctcagtgagattttttatcacctttgaatttgtatatgaatccaccaatagtggcgacagttgttatatttttagctgataaattatagttgaggttcttaagatattcatttggataatcaggatagcttactaggagatattaaattgcgcattccatgtggactataatacccacacacaccaggcaagtattcccatctatgtgaaggcagagatgtttcattatgccacctgcccaccagggactgccaacaaggaactgaaggacatttttttttcttagagacagggtcttgctctgtcgcccaggccagagtgcagtgacactgcagccttgaattcctgggcttcgattgatcctcctatcttagcctccagagtagctgggactataggtgtgtaccaccatgcccagctaatttttaaaatttttttgtagacatggggtctcactgtgttgccctggctgatctcaaactcctagcctcaaacaatgcttctgtcttgggctcccaaagtgctggaattacaagtgtgagccatcgcacccaaccttgaaagacatatttaaatcatgatggttctatcacaggggaaaattttattttttgtgagtggcctaaactggatgcaggaggggaatgggagagaaatgctgcaaagactcataaggtgaggagtttaccctgggagatctctgggaaccattccagctcagccagctcaggaaacagtggatcatcatttctaagaaagagactaaacctctgttttaattcaaaataagttttattgagatataatttacataccacacccatttaaaatgatgattcagtggtttgtagcatattgacagatatatgcaaccatcatcatcacggtcaattttagaatatgtcattgtctcaaaataaactccatagcctttagctatcaccccttatccccccagccctaaacaaccacttatctactttctgttcccatagatttgtctcatggatattttatataaatagaatacataatttgtagtcttttgtgactaatttctttcactcagcataatatttttgaggttctttcatgtatcatgcatgtatcagcacttgatttctttctatttctgagtaatattccattgtatggacatatcacattttagctatccatcaatcaactgatggacatttgagttgcttccaccttttgcctattatgaatagtgctacagtaaacatttgtgtacaagcttttgtgtggacacaagttttcattcacttgggtagatacctaggggtggaattgctgggtcatctggtaactctatgtttaacaatttgaggaactgccagactgctttccaaagtgggtgcactacttcacattcccaccagcagtggatgagagttccagttgctccacatccttgccaacacttgtaattatgtcttttttattatagccattttagtgggtatgcagtgaatctcattgtggttttgattggtatttccatgatggcttatgatgttaagtatcttttcatttgtttattccctgcttgtttatcttctttgggtaaatgtcagttcagatccttttcccatttttaattagcttgtctttattactgagttgtaagagttcttcaactttttattatttcatacaattgtatattataatatattttatatgttctagagatataatatatagatacataatatatctagatttttatgtattctaaacatatgtttatatattatatatgtagattttaaaaatatatttgaggcatataaaaatatattttatacattccagatttaagtcccttatgagatatataatttgcaaatgttttctcccattctttgggttaccttttcactttctacacagtgttctttgaagcatgcaagtttcaaattttaataaagttcagtttattttttcttgtgttgcttgtgcttttggtatcatatataagaatccaatgccatatttgagatcatgaagatttacctctggtttcttctgagaatattgtattaggccaggtgtggtggctcatgcctgcaatcccagcactttgggagaccggggcaggaggactgcttgagcccaggagtttgagaccagccctggcaacatagtgaaacccttatctctacaaaaaaatttttaaaaaaaaattagctgggtgtggtggcacattcctatagtctgagctactcaggaggctgaggtgggggcatcacttgcgcctgggatgttgaagctgcagtgagccatggtcctgccactgcacttcagcctagaaaagtgagacccttttgcaaatatatataaaatatataatatattatatattatattatataactataaaatatatattttttatagttagcagtttttggttaatatttgtatatggtgtgatataagagtacaactccattcttttgcatgtggagctgttccagcaccatttgttgaaaagattattctttccccactgaatggtctccttgaaaatcaagtggccatagacacatgggttcatctctggagtctcaattctattccactaatccattgtgccagcaccacactgtcttgatcattgtagttttcatctgaaatcaagaaatgtggagtgcggtcttccaagattgtttttgcttttcaagattgttttgtctattctgggtctcttgcaatttcatatgaattttagaatcaccttgtcaatttctgtgaagtcatctgggattcttacagttattgcatttaatctgtagatcaatttgggggacattaacatcttaacaatattaagtcttctaatccatgaacatgagatgtttcccacttagtagatcttctttaatttctttccacaatgtcttatagttttcaaagtataagttgtacatttcttttgttaaatatattcctaaacacattattctttttgatgctgttataaatggaattgttttcttaatttcacattcagattgttcatcgcaaatgtataggaatataattcattttgtacattgtatcctgcaatcttgctgaactcatttattaattctagtagttttttagtggattccttagcattttgtaagatcatgtcatctgaaaacagagactgttttccaaaatacctgtaccattttgatcttcccaatctggatttatttttcttgcccaattgctctgtctggaacctctagtacactattgaatagaagcggtgagggtggacaacgatgtcttattcctgatcttagggggaaacttccagtgcttcaccattaaatatgatgttagacgtagggttttttctagatgccatttattaggttgaggaaattcagtgcaattcccattttcctgagtgttttcatcacgaaaggagcttggatttttgtcaaatccttcttctgccattttaagatagtcatgtgggttttgatgtttattctattgacatgatatagtaattacattggtttttggatgttaaaccaatcttgcattcctgaaaaaaatcccacttgggcattgtatataattctttttatatgtttctgaattcagtttgctagtactttattgagttttttgcagctatattcgtaatagatattggtttgtcattttcttgtgatgtctttgattttgatatcagagtaaaactagcctcctagaatgagttggaaagttttctcttctcttctattttttggaaaagtttgtgaaaaattggtattagttctttatgtttggtagaattgacttgccatctgggccctgactttccctcgtgagcagcttgttgttgttgttgttgttgttgttacaattcaatctcttgttaaaagtctgcttgggttgtctaattcttgttgagcttgtttcagtagtttgtgtctttcccggcatttatccatttcatctgtgatctaatgtaatggcatataattataatattccttcataatgctttttaatttataattttaatagtaatgtccactgtttcatttctttttagtctagctctgtcacccaggctggagtgcagtggcacaatctcggctcctgcaacctctgccacctgggttcaagcgattctcctgccttagcctcctgagtagctgggattacaggagtccaccatcatgcctggctaatttttgtatttttagtagagatgggttttcaccatgttggccaggctggtcttgaacccttgcctcagataatccacccgtctcagcctcccaaagtgctgggattacgggcatgagccactgcacctggccctgtttcatttctgaatctagtaatttgagtcttgtctctttttttcttggcttgtctggcttaaggtttattagttgtgtttgtcttttcaaagaaccagcttttggtttagaaaattaatgaaactaatttattctgttgttttgcattctctttaatttctactataatctttattattttctcccttatgctttctctaggtttagttttctgttctttactcaatgttctaaggtggaagtttaggttattgatttgagatgtttcttctttatcaatataagcatttatagctataaattcccctctaaacactgttttagcttcatcccgtaaattttaaattttagtatgctgtgtcttcatttacattcataccaaagtattttctaatttctttttaaatttcttctttgacccattgattatttagggatgtgtcaatttccacatatttgtgaatttttcaaatttatttctgttattgatttttaattgcattccactgtattcagacaacatactttgtattatttctatccttttaaatttattgaggtttgttttatggtctagcatatggtctatcttggagaatgtttcatgtgcacttgaggaaaatatataccctgctgtgatgggtgaagtgttctatagatgtcgttgggtatagttggttagtagtgttgttctggtgttctactagctttttaaaatcttctgtccagttcttctatccacttttttttttaagtggagtcttgctgtgtcgcccaggctggagtgcagtggtgtgatctcagctcactgcaacatctgcctcctgggttcaagccagtctcctgcctcagcctcccgagtagttgagacttcaggcgtgcatcaccacactggctaacttgtgtatttttagtggagatggggtttcgccatgttgaccaggctggtcttgaattcctgacctcaagtgatccacctgccttggcctcccaaagtgctgggattacagacatgagccactatgcctagcccactatctactattgaaagtggggtattgaaatcttcacctgttattgttgaactgtctatttctccctttgattctgtcaggttttgcttcctgtgtgttagtgctctgttattaggtacatatatgtttttaattgttatatcttcctcaaggattgaccctcttaatattatcaaacacccctctctatcttcactaaccatttcctcactaataatttcttatttaaaagtctattttgtctgatgttagtataactactccaactttcttgtggttgctccaaagctctgttttgagttgtcagtggctttgataggcagtgtaagtcatggaagaacctgcctgttttcttttcttgctcatatttcaaataaaatattttaccaatcagtacattctccttgagtattacttacggtccacaatatgaagatctgtgtgatgtgaaaactcttatgtctagatagaacccttttcatgggattggttaattcattttttatcctctccccttcatcttcagtaaatgaaaatcataccctcctttaaaatgactagatgtcctcatgaccaggataaaaatgcaattaaaagaaaggcaaccaggaaaaactttgtaaaaaccataaatatgtacatgtgctagaaaacaatgtgtttactcttgaactcctcttcaagtcacaagtcctaaattttgaacattgtttacttgctctgaacacagcagagctcccaggtgatgccagttggaaatggaatccattgaggataacatgcaggggccactatgtctgtatgcttcaatgtgccagcatgattacagatttcaaaaggaaaaaacacatttaaaaaatagacatcgttccattctgagcaagggtccctgtttgatctttctctgtgtctgagcccacttgttgtcctgaaggataggtgacagcccagatactcccagtgggtgagaaaacctcatattctatgccagtttcctgtcactgctttgagctctaagagttcagagaggtgagggcagtgtgacctccacctagctgagtgttggcatgagtccctggtgacagtgtgtctgagctgccagtacaccggcagtctttggagcagctcttcctcactctttcaacaaccagccaatttggtctcaggaaatcactctgcagtgctggctgggattggaagtcatttttaattttgtgacaaagacagatgtgtcctacgggagtagtaagtggttttactggtgatattaatggaaccgtgacctcttctatatctatggtcctacaaaacaaaatatgtttgtattattatatgtcaggcaaattcattcttagcccttccttgaagtaaattgcagaggaaatatactattaataagcccagagagtattgttcgtgtgttcgtgtgtgtgtgtgtgtgtgtgtgtgtgtgtgtatctacagtcatatgctcatttgcaaacacagtggatttataatgccacttttgactgtcacacaaataatgtgttttgcatagtgtttggagggacacaaatcactgaagttctgatatcttcggatagaatttcagtggacccagtgctgaaattggtattggcttttagaggccaatagctgtagtaaaatttaagttttttggggatccacagtaccaaagggaaagaagaaattcaaagatatgttgaattaaccttttctattttcatttgggattggtattcattagtctagaaatgactacactgattttattatctcctgtaggaactttttgtgccagtgtcctttgttgaaaacagttgcttaaggagacagtaaattaaatatgaaggatttacaatttagttaaatgaattaaaccatttcttagtgtttgtgtttaccttgggatgcacaaaagagacaaaaatatagactcacaagaggaaggaaaggaatgatcaaatcccaatagtccatggctgaatgtctagctcagcaactttatttaaaggaagaatttaattctgataagaaacccttgtgtctatctgattaactttttctctctgcatatgttactacacccactgagatttcctaataaacacataagtttattaactgtgacagttaatgtctcattctattatagaggatgaaactcaggtaaatcaaatgcaaaatttatagttttccttaagcaaaaatggatggagctttatcatttgagttttaactttaataattaaaaatattactataaaataatgcatgatcattctagaaagactgacaaatatagaagaaggtaaataagaacaacaataatccataaagccaacacccaaagataatcatttttaactttttttgggcagagaagggatcttgctatgttgcccaggctggtctcaaactcttggcctcaagtgatcctcctgcctcagcctcccaaagtgctgagactacaggtgtgagccactgcacctggctcttaaaattttagtatgtttgtttccaatcctttttcctatgccactatatcaatatatatttatatttttgatagttaagatgatgagtataatttgtgattttcatatctacctactggtaccagcagcgaatctgtatgggtctacagcaacttgatccttgcctccttggaggaaggaattcagccaagggcattagtaggtgtaaggcagagggagagactgaggcaaattttagagcaggagcgagagtttattaaacagttttagagcaggaatgagaggaagcaaactacacttggcagagggccaagcaggcaactggagagattcaagggtttgtgtttattttcccctgatttttcctttgggatgggctgtccacatgcacagtggcctgccagcacctgggaggagccacatgcgcactgtgtttactgaagttgtgtttgtgctcacttgaggtgtttttcccttaccagttgagcattcacagaggaaagtcatataccggttaaactgtgccattttgcctttgagtgtgcatgcttgagcctgctcccccaacttctgagatcttatcaggaagctgctgatcaccagcttcaggtgtttcctatctgttgggagacggtctctggtgccagctgtgactaattattattttagaaagacagtttaataaccacctgaccatcacctgatggtcacctgacattcttgggaggaggggcactctcctgtcccactcatgtctgcctaactgccaactctaacactttgttcataagttcaaatgagtcataataataataagaaaattaacagctaactatttgccaggcatcattctaagtgctttacatatattaattcatgtaatcctcatcatagccctttcacttagattttacaaatgaggcacagagggtataatgatttccccaaggtctcacagttacacaggaccacagccaggattaaacccaggctttgaggcgtactctgaaccacctccctccgactcaaagcctgccccaaagcctgctctcacacaccatgccttggtgttcagccctttttcagaatttctccaacactatgcagtaccatgaggcacttactttcccactgaatgtgtggaaatcagccttcatctctgaaaaaccattgtcacctgctggcagccctttctatgggggccttcaagagaacgtagccagaggttcagccttcagggtgccgccagggaaggggctctagattggaggcagaagtaactggcctacaggcctggctgtgcccatctagacaactcatttcacctgtttgtgcctcttttctcatctgtaaaaggacggggttggatacccgttcactcattcattcagtacacatgagacagacatgaatacaatccatttcctctcctctaggaatgtagcatccaaggagtacccagagaaaaaaactgctggttctgtggaccgtgttgtaacagaatcaatgggaacactgggaaagtccctaatgtgggctagggtggagaagggtgcaggaaggaagggggctagcaaggcttcccggaggatgagtgggaataattaacatataggtgccagggaccacacaagatgggctgtggtgaaagggtctctctagagctcacatctgtgcctccattccacactgctgtgcagaaaactatcccatcttcagcaggctacagcaatggcccacttttttttcttttttggcttaaaactacagaaatgtattatctcacagttctggaaactctaagtctgaaatcaaatcatctgggccatgccccttctgaaacctgcagaagaaccctccctcgcctcttcctacatgctggtggttgcccgcaatccttggcattctttggcttgccgctgcatcacacctgtctctgcctccatctgcacatagtgcgagtctgcacaccctgtctgtcttcacatgactgccttcttacaaggatgctaatcacattggatgaggagccctcccttacttagcttaagcaattacatttgcaacaatcctgttttcaaatgaggttacattcagaagtacaggggggttaggacttcagcatatcgttttggtggggacacagttctaccataatgatcactgtagccaccatctagtctgggcaaccattgcctgcttactgcttttgtttctctccaattccttctccattcagcatcctgaattagcttcgtaatccacaaacctgaggcaggaccagcaagcaggtgggggcctggttggttctttcaggtccaaatggagagagttcacacaggacttctttccatttagtatataaggctggaacaaatgcgggacgatcagaacacaatgactcccgaagagatcgttgcctgaggatgtcaatagattcccgagggcaagggcagggtagactgagaatgtttctaaaaggatcttggactcattctggttccctgaggagttacagggaagctgaacaggtgtttgaatcctccttgcctctgagactggccaaatgccacgctttttaaggaagtattggtgcttaaagtcttttccagacttctctgcaggcacttgcacagactttgctattagcaggtaagtagcgcatactaaagaaataagcctaatatacatatgaaataaatgcagcattcaacacagcttctccggcctgtccgcctccccctaagcagctcagaccttctcattcattattattagcctccgaggaaaagtctagaaaacctttaagtcatgcttctgtcattcaaatgataatcctctcctcaacttgctagacttctgcatcaccttgaattctccaaagagagttgaccttcgccactgcatctatgccctttgagcacttacaaaggctctggagggcgcttcctgaggcacttagcatagctgtggtgagaagtctatgcagaattttctcctttctctcctactgcacttttaggctttttcccacagtggtccccccataccacattgcatattaaggtattggggcaatctgatcagaggccaacaacagatatgaaattaggttttattagggaagctttctttttctgggtagaaacacagagggccaaattcagagacaaagatgtgaatgtatggattacattaagggagaatgacgtgactgtggcaatgcctaccataccacactagctacagtgtctagatgcttgcatgtcaatcatttatgtatatatttttttcattttcttctcattcagatacaggtagacctttcgtagagatgtacagtgaaatccccgaaattatacacatgactgaaggaagggagctcgtcattccctgccgggttacgtcacctaacatcactgttactttaaaaaaggtaaatttgaacaccgctattctcagcatactttcactgcaaataagcataatgaagttttactcgttctatctttctggaataatttccttacaaacacctgggcttctcagtggactttcctgtaacatccttttactataaggaatagtgctagaagttatgtccatgcatgtggttaaatagaataaaatgatggtgtcttaagcataaatcgatgtgaataatgaaagaactgaaatcgtgaaaaatgttatgtattgccacaaacccaactgtgtgcaaatgtgagaaaaatcaattctgctgcttacacaaattaataactttgcagagagtggattatccagattactgcagagaagacagaatgtcagcagggtgcccagttctccaggcatcgatatgttctggcttcatgcataaggagccagcacgtttggtttgaattggcaagttccttgtgataaaaggcctgtctcctgctgagcacccaaacttcatctcttagggaaaaagggaggaaagaaggccatacgtgaaacttttcttcatactatattgtaaattgtacatatggaaaggtaaaagatttagggtagaatctaataaagacaaaaactaaacctatgacattctagctaattaatcagcagtaagagttaggagtataccaggactcagaactggataaaagctccccaaacggaaaactgtgctaagttctgagagcttagaactttaagagagaaagtcaagtccgccccagagcagcacctcgcacagtgcatcacagagcaggcactcaggaagtgtttggtgctggtagctgtggcagttaggctggaaaagttcagagaatgatgttcagtctcacccatcaaccctgagtcctgaaatgtggtggaggattctccttatcctctttccttgcattcactctcctgggttgttactcacgtaggccttcaacatagtccatcagagacaggttttggcctccactacatttgtgtgccatcgccaggaaatagaaagtcattatacagcagagctggaaacgccagaggagttgaactcctcagttggtcaagataaaaacaccctggtttccagagtgtcaggaacttcgcaggtcatactgggcatttgagccaataccttgccttctcattcagtgttcctgccatccttcttgaatggtctagttcatataggaggaagacaagtgtggttaagagcagaggctggtgccacattgcctgcactctgaacatactgcacttgtcactgggcaaactaatgagttatcaaacctctctccacctcactctccccatctgaggaagggggtaatgacaatagtaccacctcacattgctgttagaaaacttaagtcaggtgatatatggaaagcacttagaacagtatctaagtacaagatcagccctattcaagggttagctttagcattatttaacagtttaacacccaatactgtacttggtatattaccaagtcatgttttcaatagcatggcattactcccattagtctgagataattattgctgtatgattaatatggaaaacaccacgtggagagggaaacgttctctttcatgggagcgctaatgcagatgggttgtttggtcatcaggagcattccaaaattcccatataaaaatctggggctggtgggagtctatttactgttttttctgcctacgatctggagtgcacaatttaaaaagagagaaagagaagtgtaaaattttcacagggattttggtttggcacatatatactggaaatattctaacctatgacgtatttctgctgacatgaagttaatatctttccctttcatttctcttattgtcccttttcttctaattttctgtcccctccctctccttttcacatgcctgctttgtcggagccatggtcagctgcagacaggccttgctgcccagggcttcctttcgaggctgagatccacctgcccatctgccttcattcttacacatgcggtggtggccacagctgatgggctacagtctttgactgctttagatcttgtcagctaaatgtaaagttactttgtcaatggaatgctactaacagccgtaatggatagatgagagtaagagaaacacttcggaggaaattttagtgtatttttaagttgtactgaggacgtctgtcagcaatcctttcttttagattcagcacatgcttgttttcacttatttgtaaagtaccatagatttcagtccctgacttaaatttttctgggtttttcctttgcttgcactaaattagaagagaaggttctttttttcccaccgactgcattcctgagtttacaggtagcaccttgatttactgaaacatgaaagcgaatcctttaattgctttcagttcttcataaacaggatgtaattaatttcaaacccaaggaacaccggtaatacattccgatgtaggcatagtccctggaagagaggcactagtggcttctggactagaaatctctgccataggatcacaaatccagatcagcgccttcagcaagcaatagaaataaatgataactggatagagcgagggatgccaggtgtactttttaaaaggcgatagaaaaggtttcgagcttctttgtggctgtttggtatttcctttataatctgttgggggaaggtaatttgatttttttccccctttttcaactgggaataaggaatagtggtagttgggagtctaccaccactgaaattgggctggcaacctggcatcaggggaatttggctgggccactttatggagcaatgaccctttataaataaagtttaatcccaaggcagagtgtttatcttgtagtctttaaatgttacattcttgatgtcagaagaaggcataaggagaaagtcagatcatggattattttcttctgtttggactcaccgtgcttgggaatacttctgagcattagagagcacttcattcattgcagagtctctggcctccgaggctgccttcaccatcagcagcttcagcttctgggagtttcctttccagaggcagagctgatgccttccttgtgacacagcaggatcgtcagaatgacagccccagtgagtgctgagttaatgttatgaatcttggaggacctggaattatttacactcttttgaagacagccacttcttcagtaaactatgcaaaatgggaggaaaaactatggcttgttaaaagcgctggatgatgaaaacaaatgagaataatctggcagccccggtagaaaaaaaatgctaattggtttctctctctgtttttgagacagagtctcgttctatcacccaggctggagtgcagtggtgtgatctcagctcactgcaacctctgcctcccgggttcaagcgattctcctgcctcagcctcccgagaggctgggattacaggcgcctgccacaatgcccagctaatttttgtatttctagtagagacggggtttcaccatgttggccaggctggtctctaactgctaacctcaggtgatccgcccacctcggcctcccaaagtactggaattacaggcgtgagccaccacgcccggcctcttaattggtttgtctattgagtgtctgaccagcttattatgaagattcccggaggccaaagagttatgggctccaactgaaagtctgacatgacaagtaggtctatcctgggtagatgccacttgttgccaaggctgatagtaaattatcataattactataatttatcataatgcaaatatcttttgctatatgcaaaaaaactcaagaaccaattataacaaactagagtttttaacctagtttgttataagcaaactacaaagttttactattttcattttagatgaaaaatcatgttttcacaaactgctggtgaaacagtattgccaaccagtgctaataggaccttgttaatgcatgcctcttccttttcagtttccacttgacactttgatccctgatggaaaacgcataatctgggacagtagaaagggcttcatcatatcaaatgcaacgtacaaagaaatagggcttctgacctgtgaagcaacagtcaatgggcatttgtataagacaaactatctcacacatcgacaaagtaagtgatgcttcaaaggcatgaacataagccgaagtgctctgtatttttatctgtgtaatgaaatcttaattttaaaaaatttctctcttatgcttgcagccaatacaatcatagatgtccaaataagcacaccacgcccagtcaaattacttagaggccatactcttgtcctcaattgtactgctaccactcccttgaacacgagagttcaaatgacctggagttaccctgatgaagtgagtgacccatttttctatttcttctgcaggacagtattttaagcaagtgaaatcccgcaggggttttgagatgggaaaaatcagaaaatcctgactcctgtggcagtgttagtcaataaagaagctttgggtttggtttgagtgctttctttgcctggcatttcatgagtgtgatatgcatagatactgtcttttgatgtctgggggttttgttttgaagagtgtagactggtatttctattgcatgattctaggtggaagaaaagggattgtttcattcttggaaactactctgtaggatttagagatgagagagaaatttatcaccaaatgccaggcagggactgccttttgtaacaacaacaacaactttccaggaggctgtctctgtcagcgcattcatttaagatactggcagacagtcaggcacctgattggagcatgtttggaaaagatattacaacccagccatccaatattccatttgttaagtgtcaggggagcaattctgtccttcagaaaaatgagaagaatgaagcctgcgttgggttcccttattcaaatcgaacatccttgcaaacaataattgttttaaaaatgtatagatggggaaactatgataaactgttacggaaattttgacagtagttctagcccccatttcttgtgtgtcagcatgatttatgcggcatatctcaagtacaatcatttgttatgtcgttcagattgcccaattacaaagtcaatttatgattaaattatgtatgaaagattaatgcatcagcctcaagctagtgttgtttttcatcgacatttctcgccatggaaatggaataacttagcaacaaaaacgtgtaacgagtgccctgtagggacacattaaggacttatcagtcataaactattctctaggagaggtattgtttcatttaaataaaaatgctatggcttgtagcaatattttctgggttttaatagaaatcaaatattctccgtaagtgccaagagggaagaaacttttatcctgctagcattgctgctgtaagtaagagtatctacaacacatctattaaatgctaataatcttctaaaacagcactgtccagcagaactttctgtgatggaaatatcccgtatttgtgctccagtactgtgccactagccacatatggcagatgagcacttgaaatgtgactagtgtgactgaggaaatgaatttttgatttcatttaattttaatagccacacgtggctggtggctgcagtactgggcgaagcaattctaaaacacaggatgagttctttcccaagtcagaagcaataccagtgttactcagcttggcaaaggaagtagtacctgtataaatagagctgcagaaagctccctcagtctgttacgttaggggactagttctctgacttttgatagtggcaattgacttttctctctggttattgctgagaatgaagaaaatggcctcaacatgtgtctgtctgttccaatggggaagtaaaaggacaggtgggtagaagtgtattaaacgtggcacagaggagaactaagctcaagatccaaaaatcagttctggacagctcccaaagacatttttccatgctcctcccctccgccccctatgactatggggaaggattgagaggtggaaataacttattagttataaaatatagtgcttaaaaaaaaaaggagacggcaatgtgatcttgtcttctcaaaacagtgagcaggactgtcattgtggccaggtcagattgcagagcctaaggctaattcttgatcttctctgagacaaacctgggacagcaccttccaagtcttggttaaagatccatttactgtgatttagctgacatgggcaagcactgttcaaatagtgaaataatgaaactatagcattattccaccttagtaagtacagccaagactcattatattttccttcatatctcgtagggacaaaaaaggaaactcacatggtgatttggtgagagaagcactgtcattaagccagacactaactaaggcttatgattgtccacgtttgtgtgcgatatctatgcctagggaacaggttactgtgtagagaggtgtgtgtgccagaggaaggacactagatttatgctcaaacaacttcagttcctagccaacttgggccagggtatcacttccttcagttttttcatcactaaaagggcagtcagcctgccaatctcattaggttgttgggacaaacaattgagatagtatatgtgaaagtgtatttgaagaaaattaagtgctaaataaatcctgctatgctacatatttgaagcacctctagacacagatgtagtttccaaacattacgctctaggtggatttgacatgattcttagtataaaacagaagctgttgtcgaactaatgatctaagaaatgttaaaatcctatataactttaagcatgaacactcactccttctacatttgttatacattttctttctagaaaaataagagagcttccgtaaggcgacgaattgaccaaagcaattcccatgccaacatattctacagtgttcttactattgacaaaatgcagaacaaagacaaaggactttatacttgtcgtgtaaggagtggaccatcattcaaatctgttaacacctcagtgcatatatatggtaagcatagttcagcgttgccaactcatgctatgctttctaatcattgtagatgtctgtgttctctaaataagtcagttttctgttggccaagagttacattatcatgaatgaatacagcttggccatggttccctcctccccctgtcaaaaagcaaaccacattaagtactctttacatttaatacttttgaattgaacagagagtcctttctttagatgcttattatggctaataattcggttagaacctaatatatttatgaaattcttagtgttctgtataaacaaaacagaaaaagatgatgagttttatctttattatctaagaaaaatttctcaggtactaccatgaattagagaaataaaaatatggtatgctaaatcatttagaattaatgctattttattcctgcttttactctcaaggaatcctaatgctgttgcttaatttcagtatgcaaattctataaagaaaatgcttaaagaccttatttccattgctgaaaaggaaacagtgtggagggcagaaactatggaacaattctatcagtagcctttatttccttttgtctttctccagttgatttttgatatcaaattggttgttttagggtgtacagagcaactttttctcaccttgcttatagtggccaggtagatttttagaaatatcttcccacttctttgttattgtgatagagatatttaaggtgtttcactttctgttgctctgccactgttttatgtggctaggacgtgataccatttgatttgaaaggcgttcaccaattacagtgcttttaaagtatcctattcatgatcaacatttgggctcattgataggctctatcataattcagctctgtttatttactcattgattacaccctccctgaatgaggccctaaggttttgtttatggaaattattcttttctaatgtatgtatcacttctcctttcaaagataaagcattcatcactgtgaaacatcgaaaacagcaggtgcttgaaaccgtagctggcaagcggtcttaccggctctctatgaaagtgaaggcatttccctcgccggaagttgtatggtaggaccatccttatttccataacagtttaagacatactttgtaagtgggaagctgcaagagcctaatgactcgaattcctgacaaaataccaagagacgttcctcagacagccccagagagctcagaactctgtagattcttgggtggtggaggtgagaagggctggggaaaaggaaataatgtagcaaggtaagcgagagatgaggtttgtttgagtgctcgcttcagtctagtctcttactgtggctaactttctgcatctctaaaccttcctatgatgtcaacattctttgaatgggatgtgttgagcaatgactaggaagcattttgaatatgtaacatgctctattaaccctgaagaagtgggctcttgtaatgagaatgctgaaaataattcttttatatacagctgggttgaaagttccagtcctgttttaaaattaaacaaacattaatagagacaagacttactcatttgaagagggggacgatggggcctatttgaactaattaagttttttttggctagaaagatacatattcaaaacctccttcagcagttgttttttaaaacactggtacaacacctgatgtaaaacaatgtaatctgtttatgatctgcaatcattttacaaaattactgttaaatgccaatatctttggctcaagtcattacattttaaacaaagggtatagtacaaaactgattagcaaaacaatccatacaatagggatgtggcgccattttagaatctccctaaccagagctgatttggctttcaatgtcatatgagggcagtgtttgtttgcagttccctcaaatacttaatagggaattaaagagaaaattttaactttgtgctatgtcttcatgccattgcagtagaaaaatgatcttttttgcttcagaatatcaaaaacgtttagtagtaaatttttaggtttaatagtaaattgaatagtaatctgatgactccaggaggtacattcactcttccagtgtctgagggcacgctcatctgttagtgttgatttcttcagtaactaagtagcaagggcattaaaaaaaaattcaatccaccgtcaaaaatgctgacttgttgtaggaaataatttaaagtaataccaagacaatatttgtaatcacaaagtgtagcatcctcattttaattactttggatctgagacacactagtaatgggaatttgtttgtaggactttataatcatgcatgataatgaactaagttcccaatattaaacctttatacagaacacaagaaactcctaatggattaaaactgcctatttaaagaaccatgcattttaatgaaatcatagaattttagagttataaggaaactttgagaacctctagaaaatttgagaaaattggagcccaaactggttagtcacatttgcagcagcctgcagtgagtagcagagccaggtcaagcacccaagcctctgactctcagttctgtgtgcaacagagtgatatcaatgcatcgattcagtatttaatacgtttttaaaatttctttaagtttatgctttctgttttttttttttctgtgccttaactgttcttcctcagaggaaaaatcttgatagtcttgatttcactctagtttatgaaagggacaactggtgtgaccatttataaaactaataagaactccacatgagaccacaatagaaaagtctatttttatttttatctggagaagtgatctacttgatctgacttacaatggcccttatactgctgatggagcctcgtggaaaactctgaaaaacatctcggatggaatcagagcccctgcttctgggttaatacttaagtcacagtggccaccagtatgcctgtgggcacactaagctactgcttttctatcttcgctcgctttatttcttcttccttgccaataaatatgaagtgttacccagtctaaaaatcatatctgcctttactcaaaagttaatgcctacattttaaaaatcaacactgatgatcaaaggtttgaaattggtcaacttgagctcaaaaacttcaatgaccgtgttatcaaagtgatattgagaggccgtgtgaaatgacttactgatcatgtttttaaccacaggttaaaagatgggttacctgcgactgagaaatctgctcgctatttgactcgtggctactcgttaattatcaaggacgtaactgaagaggatgcagggaattatacaatcttgctgagcataaaacagtcaaatgtgtttaaaaacctcactgccactctaattgtcaatggtaagtttgctgttcatactttcttctggttctggtaggcaacaaattagtgaacatttatgaattcaaaaatcagcgtaacaacatcaaagatagcaaaatttcaaataatcatttgaaaaaacacttaacgttaagttcccatcttaacaatctcgtgtttgtttgttgtattccataggcggcatgatcttttatcactgtaatcacaatgtacataccatggaatcaaattattaataatctcaaaaccctgctactacttttaaaaatctgcattttcttgacaaataggagggtttatttgtttttttgtttcttgtttgtttccctgacatcaaagccagtgagaatgtggtccttcatgtgtggcccaggagaaagtcattagaactgctcttgacttctgtcccgttcttcatctcctttccagtgaaaccccagatttacgaaaaggccgtgtcatcgtttccagacccggctctctacccactgggcagcagacaaatcctgacttgtaccgcatatggtatccctcaacctacaatcaagtggttctggcacccctgtaaccataatcattccgaagcaaggtagggacagtcagtttttttactaactttcaaatactttttgacacctggaattaagattttttaatggacgcagatgggaatctgcatgtgggatgtactgtatatttgaggcaaaggctctccctgccttggaaaaaggtgggcaacagctactcttctttcttactgaatataccctatcactggctaacaatttcataatttttctctctagtttacagttttagaagcacaagcacaaaactaaggtcctcccatgagctgtgacatgagctcaggttggaactctggtctcctgtttctcaactgaagatccctagactttggcaataccactatgtcagttgcattagcattcccatttttcattttgtattctttggttatgatccaagttcttcccaacaccagtgatcactatgtttcctacttttgggctttgctcttccatctgtctgaaatgcacctccacccattgcctgcctcctaagagggctttatttatcaaaccccatggctcagctcttacgtcaccttctctgtgaactctcctcactgcctcattcagaatcacttcttccccctcagtatgaacagcactttgttcacgcccttgttacatcactcgatgcgcaaaggtttgtctctctctaagctaagagctgattgagagcacccttgtgtctttaggctgggccaaggctggcacacagtagatacttagtgtatatttgctaaatgaatacatccctaccctctgctaattgtgcagcatttccttgcatcctgttgatgactgagccttgtttgctttttcctctttttgtttagtctagagggatgatactaaggatagtttatgggagctaatttgaagaacaggaatagacttgataggtgcaacaataagatattattgaaactgcccaaggattatcattatgccaaactattttccttattacttttaactccacttgcagagtgttcaggaggattgttattcaaaaaaaaaaaaaaaaaaagattgacaggaaaagtaaacaaagcataatcctaacataaacagatagaagtggctatttgattttctagattcttcccacaattccaactcgttttgcttagggtgtattactctcagagtggaaagttactggtgagctatggaattcctgggaagtagctgttttccacacatctgatttctcatttgactgtcattttctaagaatagaaatagagaagacttacaaatcttaaatatcttctttaccactgtgaatgtttaacacataagacagtgagatctactgaaattctatactattttgcaaatttggggtatgcatcaatatttatcgacccatccgtttagggtcttgacatatgtgccaacctaacatgcaaataaataaaaaaaaaactaaataattgaagctattagattcggataaaagtgtagagttgaatttttctggaataacagagccttttctaaatatatttaaattttgttttggcaatattaaatctaaaatttctattctatctaggattagaactagtaactatgttagaaaataacaattatggtgatagaacataatatttataaatttgggtttaagtgatgctaataaaatatggtttggggaatgaggccacctcgaatggaactttgtaaacattagctttctttccaatttctttgtggtgtaagggatctctcttctgtgtgatggaataagttcgccaaggcctgaaaacatgtcttattcctttcagaatggtctcaagactcagagcattaccttaaatgtttgttggccatttgaattattctctgttcaaggcattttttttcactacttacaagactgatcacaaatggaagtttaaggttgcatatgctttatttctttaatacgttgctgcttgaaattatctgccaaaaacgtacacatctttgatgtacaagaatgacagctcgatgtacattagtcagcaggtactaattgagtagcctacctgtgtgaggcccagatttggtgcttggtggttaaatcagtacagttaacttagaggtgtttcagaaatatatgtagaaactttgtacaccagaaaataaacagaaccactctttcaccctctcagagagatgaagctaaaatttatagataaatgaaaccctctttaattaccaaaagttctcaaatatgtctttatataaacatatttatatacacttagactaacttagattcagttgtagacaggaattttagtaacacatgagtaagaaatgctccattgcacttattttgagttatatggtaacatatttgcatactggtgtctatacatgatcatcaaaagagattgggtgactaatatatgcacattactctcaaatacgtagaataattcctggcatttaaattttaggctctagtgaaagggcgtatctatgtatatccacggccaaagcattcgcttagtttgaggacagaatgtacttgtttaaggagctcaaaactattaattggtttaatatggccagacagttaatgtatctactatagaaagaggttcagacctaactcaaattatttagtgtcttagagtctaataaatatgtaaatatgttaagttattataactaccgatagttcaactgaaaatgtcaccctttaaaaaaaaagtagtaaaatatgctatgaaggcgagctaagttttgactgagtaatattgtggctttcgttttgcctagaatttgttcttataaaacattaggaataaaagagaggagggaaaggatgattacttttaaactcatacaggtaatgaaccaagaagaaataaagcagaatctttccctttttagttttttttttaattaaaaaaaggaaagtggggccaggtgcagtggctcatacctgtaatcccaacaccttgggaggccaaggcaggaggatcacctgaggtcgggagtttgagaccagcctgggcaacataatgaaaccccgccactacttaaaatacaaaaattagccaggagcggtggcaggcacctataattccagctgctcagggacaattgcttgaacctgggaggtggaggttgcaatgagctgagatcgcaccactgcactccagcctgggcaacaagagcgaaactccgcttcagaaaaaaaagaaaaagaaagaaaagaaaagtgataataaaactgtgatatctcttttgaatattaataacaccaaaataagttatcaacactgaataaggtggaatattttatttttctcatcctcagccaacaggtagacttctaaatagatattcctaaacctgctcccatgagtctgagcaaaaagccagagagcatcataaggatgttaagcatatagtgccttccacatgtctatagcttgcagcctctgctcatataaagtaaagataatgatatacacttcatagagagactatgaggatcgaatgaggtaatgtatttagaaagttacagagcaccacagatttgcaaggttgtaatcattgctagcattggggtacatttctttaaataagacctgagaacctttaatgaacttaaaggatatttctgcctactatagagctagtttgacaacagtgagcagttttgccaaacatttctaagaaatgaatgcaaattatggaatgtaaaatgcagttttgttgtgctttaagaatagtaatttagtaggtctggggtggagggtggctgtggaattcaggaaaatatgacttttcagaagaagaaaaattaaggaactacagaagagttagacaaaagtaaaaggaagagtaaatggaagggtgtcatgagggaatgaagtaattctcccagttcgtgtggcctgccccattcattggtttcctgtcatgagaggaagtggttctgccctgtgggttggctgaggctggggtgggctgactgggcatgtgggggagctgatgcctgctcagccagtccactttcaatttctagaacttcacgttccgcctgcattttgaacaactaagtagtacgagtaaaccccccaaggactgagctccgcttgatcttacagtcctccatgaactctgccagagtactgatgcagcctcacaggagatactatttagataagattgtccatggcaaggaggttggttggtttctaaaggaacaataataatacaggactggagggaaggggaccttctctgtggaatggaaagggtggatttcaggaacccaggagaggatagggcaaggacagtcttggcataatcagtttgtgctgcagatcactgttttctcaggaagaatctaagatgttgaaagtctacttttctttacgtgtgcttgaataccaaggagaccctcgggtagctgactggacaattgtgtggcctgaatgggtctttgcgctcatctgttccccacaaacgggatggtggggggcttctgctgatctccttcctggtactctcatgagctctgatcacctcctccatgggtgtctagagtccacctggttgtttctggattgtcttttcttctttctaaaacaaagatctgtttctaaaatgttgaatgtgtttgggtctttattctagggaggttcaatgcctgcagcctttgattactgcagttttgttttgagagcacacattctttagatcacagtccagtttaattctctctccctatataattatcacaaatcatagtttcaaaggaagaagtaacactgattgattataatagacagagttgtaccacgtactaagttattccccactcatgggaaaaaaacttaggtaacatcgggttctttgtgaaaaaactcgttttctttataagctatctgtgataactagtcaaaatatgtagagaaacatttctgtctacattgcattaatattgctgacatcttacaaagcaacttggcacgtcactgatattcaatctaaatatactgtcaaccatctgctcatcacacaaatatttattaggcaccaaccacgtgtaaaacataaaggtaataccacttgtctttagcatttatgtttgcattatacaagattaaacatatttggtgattacttattggatctatatatgtatctgtaaaatatctactacatcctcccaaggatagagaattgggaatcaaggaagcaagttctattcttggcaccgtccctgacttctgtgtgaccttggccagttctttaatctgtgtttctatttccccttctgtaaatggcaatggtcgtgcttcccctttcctatcatacacagctatgaatgagttaacttagaaaatcactgtaaattatattttcttccttcaaaagggcttgaaagtatttcccagtgtttgcacactgatgtttcccttctgtttcttgtaaactgtaaggcaatttgaccattaactctgaggatcggtaacaaattaacagaaaatttcaacttatgaaagtagaatggctgtcagaaaagtcttaaatggaggtacaaactctgtgatacaaaactgactctgtgattataatgttaataagggcccagtaaggaaaaaaaaaagtgcagcagctcctccaccattggggccaagccgtattttccgcagtgccaacctggaccaccttgccagcctcgatccagcccaaacaaatgaaggcatgctcattctctgcccagttagctctaaagctttgcctgctttatttgctcttctgcagatgagtcccttcagggtgtgaaaaatgttgggttctcaactcatggaaggttgagggagaacattattcttttggctttcttagataaaatggggggttttctaagaaaaatctagtagacatgcatggactctcaaggaaccgcttgcaaaactctaaaagtaggtcaggactggagtctaaaatagttacatgctttagaagttaactagaaaataatgtttcccgccattctcaatgacaatgtgacatctcatgtctgaaacactcttcgtgtgcaccagcagtagagtactatggggggctggggtggatggtgtcaagagaaagctgaccactctaagagtaagggtggtttactgccttccatccggggatggggggtggggtggcctacaatatcacagaaaagcagaggcatctaggaactctgagaagggcttccgagaggggcttgcctaattgcatttctctattgtttacgtcagcaaattggcaaagaaaggagggcctgagtcattagggatgtgttagggatagatcatttgggggaaacatagtttggcgcatcagtggggtatgtaaaattaacaggacagaaacaagacaattgttaatggtagttaattagaaatgtactcaaagacccaaatttaattgactgccaacatgaatgtctattatttttatgctgtaacagttttatgtcccatattttattttccacctacacaatgaaagttttaacactataaaaattgaaaaagtcaacatttcctgggggcaaaatgtaggtcagatgtctgagggaagctataatttaagacctcttcttttggaaatacggtcacatacctcatgttttaatattgatcacattcttcctaagtacacatacaatttgtatccatccatgtgtctcaacatatattctatgcagtgtgtgtctgggtatgcagcctcaattcagccatgctacagagaattttaatttaccacaaacaaaaccttgaatcaaaatgaggactttaaagaagaccacttgaccaaagaccactttagcaggactttgagcttgaacaaacagccaaataaaactggccatcttatacaggaggctttcatcacaagccaaaagtgaatgttcacttactaatgagaaacttcttgcattctgttatataattactggacgaggaagtgcatgctgcttaatgtgactgttcggacaacagcccttattaatatttcatacaaagtcctgagaacagagcatgagttcttttgccaaaggcccctttgccacttttctctgctttgtgagattttcctccttttcccactcttcttagtaatacagtgaatatgatgaataattgtttctaatgagttaactgtctcctgtaattgctatcaaacatttcattatgtgttttaaattaaactaaaaggctgagtcacaggaaatctatgcgggatgttttttgttttttgttttgagacggagtcttgctctgtcgcccaagctggagtgcagtggcacgatctcggctcactgcaacctccgcctcctgggttcaagtgattctcctgcctcagcctcccaagtagctgggactacaggcgcgtgccacaacacctggctaattttttgtaattttagtagagacgcggtttcgccatgttagcgagaatggtctcgatcccctgacctcgtgatccatccgcctcggcctcccaaagtgctgggattacaggcatgagccaccgcacccggccgctggatggtttttatagtgatcttttcagcaagattcagtgtagcttctcaggttaccagaagatagtgacacaaaatttgtgaagattccttaagaagattggcagaacctctcagattgtctttggccaaatttacagatttttaaaaattgaatgagcatttttattattgaatctagaaactaatgtcctgacacaagatctttaggtgatagataagtagaacaaatcacttataaaacatgcacttctgcctggggatctacattttagtatatcttcactgacttggtagattgtttcttaaaatatggtatctatgtgactttaatgtaaaatcagtgcccttttaggtgacaaagcagaacctgttggattgataagatggaaagggcatgatggatttagactctggccctgacagtgccttttaatgagcttctaatcactagcccttgtttcttcatactttctctagaagcctcctaggacgttttgccaccttgaatgcaatggtctacttcattataatagctgtgatagacttaatcaataagtcatttttggtgccaaaagccatgttcatccctttacacacattatctctaatctgaacaacagttttacggaatggtgattacttgccctattttcccataagtaaaactgaagctcagggagttatttctcaggtgttttcagattatggtataaagggggagggctgggtacagtggctcatgactataatcccagcacttgggaggctgaggtgagaggatcagttgagcccaggagttgcagagaccggtctgggcaacatagagaggccccatctctacaaaaagataaaaataaaaaaaattagctgggcatggtgacatgcgcctatggttccagctactcaggaggctgagacgggaggaaggcttgagcccgggaggttgaggctgcagtcgtcactgaactccagcctgggagacagagtgagaccctgtcttaaataaataaataaataaaatacaaggggctagatagattggtcttccagaaggttatttttccctggtgtcccataggactcctcagaggacatccctgtggattcccagaggaaagagctgaagtctgcagggaataggtttgggagggcgcctgcctaacctggtaggtttgctcttgtctgtcgtgagttagagctgacccatctgttgagttagagttgagcagaggatgggagaggaaaggagaaaaagacgagcagcaaataggtgaattgggctcaaatttcatgatatctttgagaaccagtgatgacctacagctgtcttgggccccagatctgcagttgggagtagaaactggagtataaactccagtgggatgagcaggtctaaataagaccagcctcaggagggtggcaagtctaactaacagttaatgggcctgcttattgtggcactttcccctattcgtattgtccttttctgtgattttcccaccatccaggggtatttgatctcttgcagggcagggaagccccattctctcatttattgttcagaattaatgtcctggattaggattcagcaagcactcagccctcagtgggcctcacaaaactcatggctatttagtcaggagagcaattaaaggagatgaaaaggaggggtcaaaagaaaatgaaggaggaaacatgagggtttgtagttgatgagggaatgaaatggggacatagaggctgctaatttcagcctcggcatgccttgacctagtcacttcaaacgattaattcactcagcattgaagaatgttgagccaggcacagtggcgtgctcttgtaatcctagctatgtgggaggattgtttgaacccaggagccctgggcaacatagcaggacccccatctcaaaaaaaaaaaaacggaattaaggaatgttaaagatttaatttttaaaaagagattgttttataggtgagaaattgtggctcaaagataaatagttatctcatctcacagctacttaatggcaagctcgggactagatgcatgtctctgatttcctgtttactattatttccaccataacactgtattgagtctccatgggaggtgcttataatctggccaaacgagccgaccatgggtggtagatggtgaatgttgcagtttagaggccgcaccaaggaggaggtgggatccgggccctgaagaggatgggtagatcttggaaagttaaatggaaggggagagggacaaagatgtgatgcagtaacacaggcatacaaacgggttggaaagttgaaaagaacttgccagagatgaatgtggttggttcatcagatttggttgagaaaaaataaaaaccaaaattggaaaggtaattttggacctgatgtgaaattttttcagtagaggctgaatggttgaggcaggcagtcactacctggctagtgcctggatgttctgctatctattggccagaagcccactttgtccctccttccaggctgatggactttcacagacttattattggtggtcttctacctgtggcactccttcagcctgcagtatgcgcactgtatctcagaaactctaccctccatgcctgaaaatcaaagtcttgggttttcactcacccttttaaaaaacattacatgggtgcatgttattccaatttcttaggtctttaatgttccatttgccttgtcatcatcattgaaaattatataagatgatcactgattgctaccttattgacaaatcagcccttgtgagtatgaaaaaagtacttgaacacgtaggatgaggaaaacaaaaattggtacttaaagaccatctagagccaaatataatagaagatggtggctgatagaggctgtatagcctggggttcctatttttattttctttatagctaagttattaagcatttacctatgtggtgttaagtgctggatatgtgctttatatgcatcatctcatttaattatcacagaacttctctaagagaaatgctagaattattaccattttccagatcaggtagagagtttgagtatcttattaggacactagtcctggttaacatgtcaaagagcctgaaagtgagcagctttccagcacaacatcaaccaggcaattgaaagcatatcatttgtcactaccaggattggttgtgtcacaactacttagacattaaaatgagtcatttttagtcaaaagctcacgatcctgaaaaccagtagggtgacatcaaaagctcacaatcctgaaaaccagtgtggtgacatcaagagatgcaacatagtttagagtttaaggacgtgggctctgttgcctgagtcctggctctgccacctactggcatccattggctgtatgattctgggcaaaataaaccacctctctgagtctgggtttcctcatctacaaatggagttaacagcactgacatcataaggttgtttgaggaagttaaatgtcataataggtgtgaagtactcagcacagtggctggtacattgcgagtgctaagtttgtttgctgaaaggtacctggtacttctagtacttttaggcagctctggggctgcccactgcaaagccacttccctctgaagtggcatcatatacacactaatgtcctgacaagatgatccatgctattaggttaatgttctcccaggaaatatatttgcatcttgggacaggtcctctgactgtttattccaaagaaatcagaatgggaccagaaatggtggctgtttcagattatttaggaaatcaaaggagttacagtatccaaggatctactctcattggtgaattctacctcagctattcaaatggtcaatcacccaagtcttgttcagcctatagtagtatatgggcttttgtcattttacttgcctgtgctcaattgtattctgatatgtttccatgaatttgacttgtctcttcaataaacatatatgtttctaaataacagaaggaattaaatcatctaattcttgcaaggggtgtgattttacatcttacatgagataggagtgagcaaactctgttttagttgaataaaatggtgctattattattattattattattaagatggagttttgctgttgttgcccaggctggagtgcagtggcgcgatcttggctcactgcaacctctgcctcccgggttcaagcaattatcctacctcagcctcccaggtagctgggattacaggcatgcgccaccacgcctggctaattttttgtatttttagtagagacagggtttctccatgttggtcaggctggtctcgaactcccaacctcaggtggtccgtctgccttggcctcccaaagtgctgggattacaggcatgagccaccgcacccgggcaaagtggtgctattattgacaagccaatatttgtgcctatctttgaagataggcaagaagaggaggccattgccagtcagtttcctatttgccattagactggatgacactgctttgcatgtcagcatccttgcctgagttgaaactgtccatgactatgggtttgtcaggtgctgacactgctgtgctgaggttagccagggccctggcagatcccatgtatccattaatattcatcattgcaaatggagaggtgctgatggtggtgacatagtgcttaggtcaggggtgtatgtgaggtcatttgacagtcactagagcccctttttcagcacacttgattgaagtgtagatggcagggttgacatctgatgtgaggtagggttgacatctgatgtgtgattgggtccacatctcatctggccattctttggcaggatccactctttcatcagggagttaactgagcaaaagacaagtgttgctcacccactgtttcccaagtgattgggccaggcaccaaagctataatgatgaacaaaatatagtccctgtccatacgtaagtagctctcgatgaaatcagataataaactgacaactaacattaatgatttgtttcctgtgtgccaggcactgtgctaagtgtgttacacattaagtatcaccctaatatttgctgatgtcaaaccaatcttctttcaattctttatttaaattatttcccttatgtgtgcatttttagtgcctgtaataaaactagtaagacatggtagcatggggttgcttttttgagttggctatgctaagaacacatccattcccaaagaatttgaggtagttcacaaaaaggacaatacataactaagcagccttggtgaagtcaaaaaatgtgtaagactagtatggagttacggcccacaggctttactttccagttgtcaagagcgagaagaagtgaaacaaacatttgcaaaattaaggggctcataagatacctttcagagaactgagatccaagagaaatgatttcttctctcatacgctgcgggacactaatagtaggcaaactccctgaccacacttcttccacagtgagtgtcagctctggtaactaacatccctcaatgttggccaatgacatagcaccaaagcagaatttattaaaagtgattttgtgggctggtgtgatctaaggacaaaattttagaatgatacaagaaatcaacaagactggtaagccctctgagcaatcttctgtgactacgattctcaaagtcaggtttttgacatccacagttacataactaggatgttataaaaccatgatttcacctcaggtctgactagctctaacatctatgtttcttatgctaacctgtgattccctacctccactcccaaaagctttctggatgtttcagtattgaccactaaataagaagtaagctgttctcttcctttttgtgagaacaaaatataatgatagcttaaaatattctccactgagtgaatgcagctactattttaagcctccttcttgaatgtgttaaaggatattttttgtaggcactcctaatatttttttaaagatttcttatttctcaaatcacccttcctcaccaactagtccttcactaagaagaaaagtgaatgaacaaaataggtatcctgtgaggctcctatctgggtgtagccaagtaaacacccactcttttagcctttcagttaccccagtgcggggccacgaggatcccctggccctggaaaagactgtgtgaaggagagtggggagctgggagggagagagtgtctggcttggggggtggagggcggggagattgctggcactcactctagaagccagcagaaggagccaggaggaaggaaaagcagaggctgggaagaagggccatgttctgagtgtgaatggaccacagggccctcgagagcaggaagcagcatgagccaagacgctcacggaaaagctcttatctaaacagaggtggcccaggacgctggatcccctccaccattgtccagggagccgacccaaagcccacaacccccgaaactcttctccactcccccttctccattgaggcaagaagtaattttcagtatgagctccaaggcgtcacaaggtctctcactgcacaagaaagtcactcctccaggatctcctcagcctgaccctgtgaccaccctgaaggcccaggcccttttcctggagcaagaggagcaggaaccattctgtctaaacactccttccaatgctacgcctttttctgccagcatccactctcctatattgtttcatctgttttaagagaacgtggccggccgtggtggctctggcctgtaatcctgggaggcagaggttgcagtgagccgagatcgcgccactgcactccagcctgggcgacagagagagactccgtctcaaaaaaaaaaaaaaaaaaaaaaaagaacgtgaggggcctgggatgttgcctcactcctgtaaccccagcactttgggaggccaaggcgggtggatcacttgaggtcaggagttcgagaccagcctggccaacatggcaaaacccgtctctactaaaaatacaaaaattagccagacgtggtggcacaagcctgtaatcccagccactctggaggctgaggcaggagaatcgcttgaacctgggaggcggaggttgcagtgagccaggatggtgccactgcactccagcctgaggaacacagtgagaccccgtctcaaaaaagaaagaaagagagagagaaagagaagaaagaaagaaagaaagaaagaaagaaagaaagaaagaaagaaagaaagaaagaaagagaaagaaagaaagaaagaaaagaaagaaagaaagaaagaaagagaaagagaaaaagaaagagaagggggaaagatagtgtttgcagattctgttaatctgatggctcagacacacaatcgctaatgttttgacacgacacccacagtagcagaggaatgtttacatcaggccctgctacaggatggccgccataatgggggccagccccggttgtgccctctggcagggttccagatgggcttttttttccttcctatttttttaaaagacattttacagcttcaatttgcttttcattactcctctatccttttgtttcctagcttgaaatgattcaatattctttacaaacagattctaatcacagttagcacgtgcagtacaatctcattaaacagataagcagagttcacacaagtcctcagatttcatcatccaaaaaagaaaaaaagagaaggagattattatctgtcttgagactttgtagaactttctggaccctctttgttgccaaattaaatgtgctttcattatacatttatataaacattcattcccagacaatggctctggctcaaataggcagccatcgggtgttgggtactcaaatcaccactcacccacactcctgtccccgggccactcattctagtgttggagtttgtaataaaacaggccagcttcatcccagaacatgctcactgagcatgcagacaaaaatatgttaccaaggagagaaaaaaattgtgataaatattggatggttttattttgttgtaagttttttttttttttttttttttgagatggagtttcgctcttcttgaccaggctggagcgcaatggcatgatcttggctcactgcaaactccacctcccaggttcaagcgattctcctgcctcagcctccccagtagctggactgcaggccaccacacctagctaatttttgtatttttagtagagacagggtttctccatattggtcaggctggtctcgaactcccaacctcaggtgatccacctgcctcggcctcccaaagtgctgggatttacaggtgtgagtcacagcgcctggccagattttttttttaatgataaaatgtatcagccagtagaaggtaaagagttcctataatttcaccatcaaagcatgtttatgaccaaaacgaactagaatttatgccaaaaatgtaactataaagtagtcttctgccccttgcccctgtccttgtccaccgatagacaggcacatcttctttctccctcttaaaaacataaatttaattttcctggtgtctgactttgtgctagtttgaatttagaggccccccagagttttcctctgtaacaggtgactctgagccagacttctcccatggtgggaaaggtctggggaggtttcttgggatcagaagtcaccctacgtgatgcacagagctctgggatagtgaagagttaggagagtctgggttctgatcctaattctgctcctttccctgtgaacttgagcaaagcatttgatttttctgagtctcagtttccttattgataaaaggatttatgaaataaggatcataatgcttgcttcatagggtgactgtgagaactaattgaggcaaaatgtgtattgcttctagcccaagctttagtagcacatagtagcagctcacaaaacttgtttcccttcaagcagccaagaatcagatattggcacaacagagatttgaaatgccagcttaatatcatttattgaaagaggatccttttaaaaaaatctgtgtgtcttaagactaaggctgtagagcagaccttctagaatcaatgtggttattagactggcaggaaatcatttatgaaatgagaattttatactggattgctataggagtcttgggtaccataacaggcactaaacagatgggcaatttctagaaaggctaaatgaagtgttgaaccatcccacccaattctccaagagaatcgatcatttcctcacaagagaaccacttcaaagaaaacacaatacttactatcagtagctaacgctcacccagctgggctttcccttctgattccaccagatgtgacaatctatcctctaaaggaaagaaagtaccagctctgagctttaagtagggggaggggagaggaaggcaggaggagtgaagaaaatctaaaaataagaattgttaaaaaccagcaattaagaaaaagcacaggtgaacacaaaggggtacctttgggtgtgcattgtgcattatacttcattgagtgttggatttgtaaaggtgaatggaacctgtcttgaattcaggaactgcagggtgacaaagtgagctctcatagaaactgtaatataaactgtaattgcagactgtgcatgcactggtcattcaacatattttggttgtgtgagatgagagatgtttagcaaattttggaaagagactgaccatgttatgcaaaagtagctaaaaaaaaaaaaagccatggaatcctcaacatagtaatggtatttgtgtactgaatatttgagatgtcttttcttactatgtccaagaagtactgaagcataataatttcttgtcacatgatggtagtacatggatatcatgttacttatggtgttggggtcaagtgcacaggttctgaaatgatccagaactgagtacaaattctgccagcagtcaatactgtcaagatggtaggtttggccaggagcattggctcacacctgtaatctcagtaccttgggaggctgaggcaggcagattgcttgagcccaggagttcgagaccagcctgggcaacatggttaaaccccatctccactaaaaatacaaaaattatcctcgcatgatggcacacacatgtagtcccagctactcggaaggctgaagttggagggtcagttgagcccaggaggtcaaggctgtaataagccaagattgctccactgcactccagcctgggtgacagaaaaaaaaaaaaaaagaaagaaagaaagatcgtaggtttgacctctgttggctttgcctttttctgtggccccagactgccttcatctgtctttggtcacagagaagccaaatacttttgagtgtggtgggaagagggcaaattcatcactgttacaagaaaatcaacccaaagcatgtaggtcagtagtgtcatctgcatatatagagggtggcagtttcccataatgtgtcaagagaagaagactagtaacttagaccagatggggagttccacagatggctcccacttggaatgtagaaggctgacatatcacacatgaggtcctagctccatgtgttggaaacataattggctgctttcttttaatttatttatatcaatctctagtccgaaattaagttgtttcaggtccagagcaatcagcagagatgacatggagtacactcttagcccataattttttttttcctttcaggggttataaatacctccctgccattgtacttggcatgctgtatgcaaatggaggtaggagtcatatagctcattaggaaagggacggaggcttggagcaaagagaggacagcgccgagctgaggctgataacagtggccttgtccagaatagtgcatgggagctttcttatctcgctttggcaggaggtgctgtggacttcctgtgcgaaatcaggagcgaacgctgctttcctcttgttgttcggcttcctcccccctcaagacagttcccagcacagtgattatctttgcatcttcaaacatggcacaatctacttccttaagagcttgatgtattcttaaggcttaggcacattcccctccccctaaatctcttttcaagtgctgttatatagtaaggcttctaaatgacattctatttttatagccccaattacaaagagggaaaaataacagcccctaaattagaaaatagccacagaatctgtcctttttatgtggaagagctggcaataagtctggcctatagtttccatactagggcttgtgcccttagtaactgccctcagagtcatgggtgtgggatgggggaggtgtggggtgtcagaggtcaacagccccaagtgaactcagatagcagactgtatttcccttgagaaacacccaggcttgccttactctaacatatttctttgcatttcctaaagcccaagagtatgaaattaagatctttgactaaggtatccccgatctttttccttgctttgggggaaaaggaatacaatctaaaagcttgtcttccagatacaagagaactttagctgtttgatgtcacaatcccaagtacatatgcaaatgtctaatctaggtatacacatgtgtatatgtgcacattatatacactcatacctgtaatacgagtgtgtgaaagatagcaagtctaacgcaagattaacatggggatgttatagtctagaaaatggagaatatgataatgaaaaaataaggcaaagtgactctcatataatgacttttaaactttgtcattaagatgtttctaataaaggagaaagtacataatttctctttggctcagtttactctacttatcaataagcattaaaatgttcatttattttacctcatgattattataaggttatacctggtaaaaactgcagaaattccttgaggaatggtcaccttttattcattctttttaaattttaaatcttgtaatctaactgtaagacagacatctttaaaaacatttggggaaatctgatatacggtttaggtgcaaacaccaccacggaattattgctaattctcttaggtataaaagtagtgttgtggttatattggaaaaatttgctcattttttagagagatgcactgaagtacatagggctaaaatgacaagatgcctgagatttgttttaaaacacagaaatccttcatttggccaggctagaaaaattttaaaataaataaataaataaaatacagaagaaaaaaaaggggtagatgaaaccaatgtgacaaaatcttgataactgtgaaatctgggtggcgggtatatgggggtgtatcacactattctctctacttatcggtgtgtttgataataataaacaattaaagaaagtagaaactcttagcaaaaacaacttcgggtaccttgtgcctgtctgcatgtgtgcaaatgtttatggggcgccgacggcatgctcgggccctgcttagctatggggacagagtgaatacgtcgatttgtcccctgtcctcctgtagctgttggcccagcggggactcagaaccattaagtcagcacttaaaaggtggtgagtactctgcaggaggacgttacagggccagtacccctgcagatgcgatagtttaacactctggagttccttctcagctcaaggaccagggaggaatagtaacggaacgtttttctgaccacattcccttctgtcttcccctttttctcactgactttagcctctcattttcctctcacataagtcattcctgctcttggctgctaaagatgaaccactcatttttttctggaaatgaagcttgaaaatttcacttagcctataatcccagctacaggctgaagcggcaggattgcttgaacccagaggttcgaggctgcagtgacctatgattgcaccactgcacattagcctaggtgacagagtgagaccctgtctctaatattaataataataataataataataataataaaattcctcttggtttaaaaaatctgtagaatctgcccaagacatgtgcaaattagagaccagcaagctttctgctcaaaaaaattctagtccagaaagtcagaatgcaaaatggtgaaatgtttaaaacagagagagaattcatggacctcaaagataaataacatcaacacctttattttataattaaacacttgaggcctgagagcttgaacagttccccaaaacttgagcagagagagactgaatttaataactgtttcatgatgttgatttccatatgcacttaattagccctggaaaaacttagccatccaactgcatattctgattaaaagccagccttttatagatataaaatggtatgatttccttgagttttttattcattaacataacttcattttttccgtgtttgaatgttacttccactaaaaactaaaatctagatactaaattttctaatttatgcatttttatttaatattaacatttacaacgaaaaggatgtatggtgacacactagtgtggggcttttttcaagtatcagccaaatatatttgctatttttaagttttgaggatgaatataggaaaaaatctaaggaaaagaagatcacacataaaatttgtgactttgttatctgaggacttacaccaagttttcatttcacctgtccccattgactgaaccatgctgtaaagccacattgtgacaacttttttttttaataggtgtgacttttgttccaataatgaagagtcctttatcctggatgctgacagcaacatgggaaacagaattgagagcatcactcagcgcatggcaataatagaaggaaagaataaggtattgtttgtaaaaatgcgcactgggatatttattccacaaatacactctcagctcccaattctaggtttattggcaccagaagtaatttaaatgttcaaacaaaaattcagagagaagaaagacaatatctgagctatgtcttcatggagatacacacagagactactcaagctaccagttccaacataatgagtactcattcctaatggtagagatggcactgtccacttgaacatcaaactggtccacattggtggttcacagtcctggctgcctattagaatactctaccaattattattatatccaaatctccggagtgcagcctagggctcgtaaaatcttcccaggtgattccagtacctaacggggattgagaatcactgatgtacataaagtgggatcccagtaagcaaaagctagtgcaagacttagagctaaaactgaatgtttctattttgtgaaatatcatgtatttccctctgtctgcaagagcaaagcctgagttgagggggatatgcaaacacacacaatctatcaagattccttgacctcatcagcgcactattcattttatactcccctaacccccactgaagcttggcaatagctaacaagcctgtcagctaggcaagtctcagtggatctcagacctagtggctttttcctgttgaattagtaaagaatacacttaaaaatctgctattgtctggcacagggatagtgattcttttcttttctttttttttttttttttgagatggagtctcactctgtcacccaggctggagtgcgatggcgtgatctcggctcactgcaacctctgcctcctggattcaagtgattctcctgtctcagcctcccaagtagctgggattacaggcacctgccatcacacctggctaatttttgtatttttagtagagacagggtttcaccatattggccaggttggtctcaaactcctgacctcaggtgatccacctgcctcggcctcccaaagtgctgagattacaggcgtgagtcactgcacccagccatgattcttttaaaaagaaaaaacatatcaagtatccccttgctgacatgtctgtttacatatatatttcttgatttggagtagagactgttaatacagattccactgcctgcttgagtgtgggtatgcttatgtcatctattcagccgtacactttgcacttgaagatgacaaagtagatggcatcgttcctcatgtatgatttaacagtaacaacaaataacatctataattttcattatgtgaaactttttgacatatgctaatgtcaccatcattctttggcagatgagagtggttatctctattttaaagataaaacagggaagataagatgattaacccaaagacagcttaaaagtataaatgagagactcaaaccaaagtctttcctttgcaaaacctaatgcccttatagccaagtaagccactgtagaaattagtcagagtggcaatagcttatatgataacaccaatagtctcttattaaacacttaggaagtttttataactatagcagtagctgtaggtggtttacaactctttttctctgacagaaataagcagtactttaaaacagtccgtgatgtatagctattgataagagagcagtttaatgaaatacttagaggaagttatataaacttgaaagtttaatttgttctttctttctttctttcttttttttttttttgagacaaagagtctcactctgttgctcaggctggagtgcagtggcccaatctcagctcacggcaacgtctgcctcccgggttcaagtgattcctgtgcctcagcctcccaagtagctgggattacaggcacacgccatcactcctggctaagttttgtatttctagtagagacggagtttcaccatgttggccaggctgatctagaactcctgaccctgtgatccgcctgccttggcttcccaaagttctgggattacaggcatgagccaccacacccggccttcagatatttttaataaggaaactacctcagtttattagcagtgaacagcaaattagttgtcacaaagtactagaaaaatgtcaagatgccattcattggttgtgtcaattcattttgctttttcctgaccatgtcaggaggatgtactgttaactgccggatattaacacaagaatttataagcttaatttcagtggtaacttctagtgctattttggtatcctatccacaaaaatatacaataggaaatgaaatgaaaaatgagaaagctaggtgaagtttctggctaacccaaaccatgaagtggcaacttgactccatatataatgtaaaaacctataaaaatcagtggaggtggagtatcaaaacatgcccatgataaaagaacgtcccaagattttctccatgaaggtttaaaacaaatttattgtctggtaattttacagttacgcagaagattttaaatatagacctctgcacttgtgctacccaacctgccatcaggagccctggagtcaaactacgacacttcctctctgtataaccacatacaaaccagctcacctctctcagcttgagttctttcctccaaaaaaaacagaactaatgatacttgccttagctagtacttcctgttacaaggatgaaatgaaataacataatgaaggccagacgcagtgcctcatgcctgtaatcccaacactttggtaagccgatcacctaccaaagtggcgggcggatcacctgaggtcaggagttcaataccagcctggccaatatggcaaaaccccgtctctactagcaatacaaaaattagccgggcgtagtggtaatcccagctactcggaaggctgaggcacaagaatcgcttgaactcaggaggtggaggttgcagtgagccaacactgtgccactgcactccagcctgggtgacagagtgagactctgtctcaaaaagtaaataaataaataacataacgtaacgtaacgtaaagtaacataacataacataatgagaaagccctatacaagtactactttagtaaagtgaatgtcatatgtacccttatgcaattccctaaactgattgtgatcatatacaatgaagactttgttaaacaattgtttgcactgaaaaaacttttaatactcacactaaacaaagtctctctctctatatatatagatatattttatatctatatatatggtacatatcccattagcagttgtaattgtaatatattagactttaaataaaatgattgagttcatatcttgaatttaggagaatttagtaattttacttttagcatctactaatatatctttttgtgggtgtgaaaaaatgtatctgtcatatgatggtgacaaaatggaagttttgctgtttctgaattatatgcagtgctttttccttcacaattaaaactgtttttattttctatacatttttagaaagcaaattaaagtcccagcttagactgcggtgatccctttatccaccgtcacatggtagcctgcccagcaatgctactccacagatcagtggggcagcgatcacactcacgctggagcaccttggattttttttctttgttttgttgtatttttttgtttaacttaaggaagggtatagaggacaataaaatttagtttccttattggcgagttttggcccagatttgtgaaaagtgagtcatcaactggagttgctagtagcaaatgtgcactttcgtattgtctaagtggtgttgccaaactgttaggtttgtagatatggagtaggaagtagaaggaaccccgtgttagaaaaaacacacaggaaatacgttatcacagcattaattctgtaaggttggagaatcattaccattttaatgtgttagcaatatttccattgaaatccttctgagtgtaccttgagaaatgtgtcctgtatgagacaaatccatgacaggagcaagaatcctaaccacagaattacagcttgtgtttcagttcccacacacaccccaattttttctaaatctcacgttctgttttcccatcagttggctcaaatgtgccaccctgtgttaattttagattcttccatgacctttacacatctacttttatttctcagtgaaacacttgaaaggaagctatattagaaacatcccgagattaaaatcagtgttccatatatagatgtttaaaaaacgagtgctggaattaggctgaatgacacatcagcccatccattctattcagtgaggttcaaacaacattgtagtaacgaattactaatgcttagtgaaggggaaggaaggaaggaacatgaaaaactccaaacttacagtacttgctgatagttttatgagcattcctgggtcataccaaagagcctagagaatgggcttgaaggatctgtctctaacatgtaaatccttgagggccaggccaggcaactggaagcaccacaaaaagcaaaagcagtaaaaatgaagagtagaaagcatgagtcctttaagactaatataaaatttgatagtctaattttatttatttatttatttatttatgtattttggcatgatctcggctcactgcaacctctgcttctcatgttcaagcgattctcctgcctcaacctcccaagtagctgggactacaggcgcctgccaccatgcccagctaatttttgtatttatagtagagacagggtttcgtcttgttagccaggctgatcttgaactcctgacctcaggtgatccactcacctctgccttccaaagtgctgggattacaggcctgagccgccgcatcaggcctaatagtctaattttatttcagcacttctgcttttttctcttcctcagtcctctttcatttattttcaattgtggaaaatgaaaactaattatagcactaatacaagtagatatccttaagaatttatttttgcataccttatagaataaatgattataatttcaaacgcacaactcaaattcttggttactttctctttgaaagtatttagttgatattgcatgccctaactgtgatgctattttcgtttttttcccttaacaccatagtatttggatataaggactgaggaacagattttttcctttattcagaagactcagacattgaaactcactgtctcatgcaaagctgccttctagtccagccagactacactgatctacaatttgcacctgagctcctttctctggccctataaagtttaaattttaattgtcaaataattttatttttaatgagaaaatgtttgaatttataatttaaaaatatatcccctgaaagagaagtactctagaaatgagataaattttaataaaactgatcataggatatgtttcaccttatttttaacttttcttctttagtgataaccattgtatttatcaaatatattttcaaaccacataacaacagttgaagagcagcttgcagcttatgtaaaatgtcatcagagaagccaactagtatttctgtaaatagtagtagtatttaatttatgttacccatctctgcggattaaaggaagtattctcaaggaaaaattcaattaaaggtgtagacagaattttgccaatagatctgtgttattcaacttaaagagtctcaaggcgagaagcaatctggtgtagagattaggagcataggcgcggaggcagacacacctgagcataaattctgcccaggcctgtctgtggtcctttgcatctttgggtgaatcatctaatctctcggaacctcagttgtcctacctgtagaatagggtaatatacccatctcacagggttttggggaggattaaatgagacaattcctgtaaagtgccttgcatgctgcctggtgcattgtaaggcatacataaaggttcgcagaaacaaagaaataatgtaaactcccatcaacgttgttttctgcttctattttaatagaagctttggagacatgatttctggggcaggcttgactacgagtaatgtgtcttgtttggaaggtgtcattcacacaaaagaagaaaaattcaatacatttctgtctccatcttgtgacccggattcatttcacttcggggcacctcagttttattctctgattatacataaatttggacctatttgactatttgttggggacttgtaaaatggccacggccattcccaggttacctacacaggtcttaaatgtggcaaatgtatacatctgacttgattttcccttgccacgaaacccagttcttgttctcggttgctctaagttcaatgaaatcaaaatcttttaaataaaaacccaaacatgactcatagatgcagataaatgctgtccataatttcaaacactcccaagccaacagaaatgggtttttcacttacttactgagcaacaattaatctgagaatctaagtaagtttctcctgaggcccattaggataaacacttgagaactaacttcataaaaaaaacagtgctggagctgacaccccagcttaaaaaggcttcatctgagctccttgtttctgaattttttgcatactgctttgaagggtctaagcttcctgagacaatgtaagggagtcagagtcgtatttgacgatctctcctgtcttccagcttccaccagctaacagttctttcatgttgccacctacaagcttctcttccaactacttccatttccttccgtgactctaaacgggtgggtacaacaattacaaggaaatggctattcagaattttttatgtcccacctcttaaaaagattcatcatcaaaataagaaaagggacacctgagctctctttcgtacactttcccatggattatttgccttcatatgcgctttccttgcaaaagagagaataatttttgtatgatcttcaaggagggaaattcttctctatcaccttaaagaatgataatgttaagggagggattgtgtcatattcatctctgtctctcttacaacatctgggcaatgccttgataatcactcaataaatgtctgctaaattgtctgccacatattgcagacactttcattaccaataatttcaataatacacagggagtatatgggtaggtgtaattaagcagatccttccaacaaacagaagagaaagcactgtgtactactcactataccacagtgaaaattgtagagaatttggaccaatgaatttgctggctaaaaacatgaggaacatgtgtttaagtcttcctgatctgtagattaaagacagaaataccttaatttattagatgggataagagaacacaactaaagtgcctagcacattacttagaaactcaagaaaatgttaggactctctcctacagccaaaccacttgtagagtatgtccaccaccttggaaagtcagctgtcacatttcagccttacattactttagcctgtaagtcacttgtcattatacttcagcaaggacactctattagtctggaatcatttgcacagcctctgcaatttcaaagcccataaccagttatttttgtcctaggacataggctgcaaagatttataagtaactggactaacttttcttttccataattttaagtatgagaaactagctttctcatttttttcatatagattatacactactttttaatgcaagcttgggttaaatttaagaatgtttaacaatttgtttcatattgccaattttttttctttggaagaatgcaagtctttaagttgtctaaaattttgtttcattactttttagacatcagaatttggaaagtgctttcaagttcatgcaattttgactgctaatgtttctttagggactaagttgtcaaataatagcactaaagtctagtggaacaatataattgcattaattcataatttaaattttcatcttctagattaggaatagatacttaatttattaagagaaattaggtaatttacacacacacacacacacacacacacacacacacacacacacacggtctccttcaggaccatccagtgctgcatgccacattatttgagcatagaaaaaaagtttcaagccaggtacagtggcatgtgcctgttgtcccagctacttgggagacaaaagcgggaaaactgcttgagcccagaagttcaaggccagcctgggcaacatagcaagaccccatttcttaaaaaaaaaaaagtttcagccaaacattatcttctgtccttgctcacttaacatgcctgttatagaaccaaacagcagagaaggctcctgttataactggcatctatgctctcaggtcacccaaacaaaagggaaggcctcagcctcacctgttcctctcattgatgtggaactgaccacctcatagggtaggacgtgcagtcccacatctcagcttcaggtctgtaattgttacgccagcagcacgagataaataagcctgaaaccctcatatgagtcggatgtcataggccccggtctcctgaggacctgctttcctgttatttttccattcttgttggggctcggcaaggggagagccttctggtaaccaccacctatgcaatactctctttgcagaatgaatggagtagctgaatcatttcaacctcagaagtagcttggggtgttcaattagttatttgtcctgttgctagctaaagtttccttttcttttgcagatggctagcaccttggttgtggctgactctagaatttctggaatctacatttgcatagcttccaataaagttgggactgtgggaagaaacataagcttttatatcacaggtaagccacacatcctataaccagagacagcctggtgacttcattctctcttcagtcttgtttgcttttagtgcatttatagcttgagtgatttttttttaattccatagaattgtcaaactttgagtgccttcatccttgctctcaggaatagaattctacctcatcggatctcgtaaggagttatttccctgtattctcttttagagttatttgtgtttgtctccctcccagactggattatgaattgggaatcttgtatgctcattttttcattcccttcagtacctagcacagggtctggtacatagcagttcaataccaatcaaggaaaccaattataatgcatataatatgatgacatcgtttttggttttgtttttgttttaaccaaaaggttaatttttttacaacttaggtaatttagactttttggggaatgaggctctgtagcaatctgaaacagagctttattaacaatagttaatgtgctattttttgatagcatttaagaatttttagccttaaatatgatggtctctgcaaatcttaaaaacctccaaggtacacaaatggcactccctatgtccctcaatgggtacaggaaggaagtaagtagctcaaagtataaaaacaattgcctggctccacactcccccaatttctgaggaaacatgggcagtaagccaactttctggaaacttctcactgcccggggcaggctgcagaaattgccaaaagttctccagaaagaaatagacatgtccaattccatgacacatatgtgttgtcagatcacaggggcctctggcaagttagccaagccccagagaagctgtgccatgggagatatccctgagtagattctcatagaacgtcagggctgtcagggattctagaggctattctgcatcatagctcttgtattttccagatgagcaaatgggatttggactaattaaatacaaaggtttgcactgtcctttatatttggttggaaacaagttactgtctcaacccatagtcgtagtatgtctgatttagaatacaaaagactgaaaaattcctgttttgttctgaacattcaataactttgtaacagtttaatcagcactgttaaatggtacagttcaactctactgagcacttggaggaacatcaatgaagtcctgtctttctaggaacaggtttctaacaccaaggaaacaaacaagaaatgtcaaattacatatatcctagtatcaaaatttatgtgcagaggtaatgtgacaggtgagcttgctttctaaagccaccactgtccaatagagatataatataagccacaaataccatttaaaactttctagtaaccacgtttttttaaaagtaaaattaattttatttaacccaatatatccaaactattgtgatttcaatatgtaatcagtattttttaaaaatattacactgcttcagtttttacacttaaatcaatttaaataaaatcaaataaactgaatatgcttcagttcctctgacacagtagccacatttcaagtgctcaaaagccacatgtggctcacagttaccatattggacagtgcagctgtaagcctctgagaaggaagcaggacctgaacaggaagagagaaggtgggatttgaataggtggagagaagaaaacagacttgccctgacattttcagagccaagacaagagtaccagtggaggcccacaaaccatacgtctaactactgacaagttctacatcaagcaaacaagccattaaataccttttagccccctatggacaaatatactttcatgatgacctgagaggtcaggatcaatttagagctctgagactactcagattccagagcagattgtggcagcacctggccgtgcagaaaaactaaatcacccacctcccctctccgccccttaccctgtccacactgcaaggggccatgcaccatgtgtggtgtctcccagcccacacatctaagctctccccatgcccctcacagatagtctcctttggccactgcctggacagacccaaaggtgtgaatactgacaagcagtctgatctcaggaggccagacctagggaagagccaacctagaagcagatttaaatcagccttatagggaattctgagatcccagggacctggatcatgatataggaatggagtgacacaggctgtcggtaggcatgctcacttggccccataaactcttcacattgtgggaagagctgcgaccagaacagagctgcgacagggatccttcttgcctgggtctgagggcagtactggaagaggatgtgctaagagaaaaggggaacatcatgctcacttccttattaatcactgttcccaatgaaagctaactgatgcctagcattagtcacagcaccaacctctggctagcccagagtctcatcgctgcatcatatttctacccatggtgttgttgctgaaagggcccaagttgataaaggtgatctcctgctgaattcaggcagaaattccctcctacctctcaccatattgtacaatgtataaccatggcggggtggaaacctcttctagatcccaaggcttatccatacaaaatgagaattcgattcagacatacctacttgaagctcacagttcttttcctctagaaatccaagagctttaactttaaaactgacacaagtccagtcaaccaagccctcattgcctggaatatactttcccttaatccttttctaccagtcctgaaaagttctggttttgattgtgatattaggttaacttgcttacgttcattattagtttttaaataattattatctttctctcactcaaatctttgtcactagagatgagagtaaagactcatgaatgttgtacctcatatgtttattttttgaaaaaaatgaacatatatttgttcagtgtttatacttgactcagtgagggtaatgctttaaaagtgcctgtctaaaattttaacgctcttcttatctagatttggatctttactggtcctcatttcaatcctgttgccccttctttaaaatacagttacttggggccaagcacaatggctcacgcctgtcatcccagcactttgggaggctgagatgggaagattgcttgagcacaagagtttgagaccagcctgggaaacatggcaaaatcctgtctctacaaaaaatacaaaaactagctaggcctgctggcacgtgcctgtattcccacctacttgggaggctgaggtgggaagatcacttgagcccaggaggtcgaggctgcagtgagccatgatggcaccaccatgctccagcctgagtgtcagagcgagagcctgcctcaaaacaacaacaacaacaaaaacaaacacaaaaatttttttgagttgccttccaaattgatgaaaatggtaaactgtggccattagaatccttgaccgcttcgactccaaactttggcacacacttgtacatagcatccacttgaaacaagcagaacttcctggtaaccattcactctctttttaagtaatatttccactcttcggtggcagtagagccttctttatttttacccaacaaatgacatccctggcgtccttttaaattcctatgcttgtccctttcatgaacttaatgcacatgcctgatccaattgagttgaaatatctacccccaagtatgcacctttataaatagatgacactttcgtctaaccctgggttgaatgcctcttctgagcaagggttgattcttctccatgacacctcataagatgccatggatgtgataatatgttagatggatgagtattatttggtaatgatgatgactgtgctgaattcgccacagatacttaagtgtgggaagatttcttgttttcactttgagggttagaaggcaattctttcttgggtctgtttttgtactcagactaaaaaaaaaagtcaacatgaattaaggagaaaaatccctctgggatttttatttatcatcttccatggatcaaaagagaataccaaaggggtgagactgagaaatagtcatttctaaaaggctgtctgataacataacaaattagcttcagtgaccatgtcccctatataagaaacaggcctcaaaacgaatttggttctttgcttttcctatgtgtgtgtttttgctgttttgctggcactcagcatgactatgggtgtgttagcaattactgagggtgaaacaggaacagcactgccttatctccctggtttcccaatgtcactaaatgcattttattttgagattcctggtggtgcttggcaaagataaacaaaatcttccatcaggaaacctgtgagctatttccacaggaagtttcaaatcactaaagtaaatagaaactctctacacgatctcaatggtgttacttgggctcacttgggttctaactaccaggatgagagctcataaatggaaagtctgtggtcttgtaagagttgattgcaaccagtgcacaatacctctgctctactatctgtgtaaaagttgatggctgatgttttactcctcatgcttggaaaatggcccaaatataaaaagatgctgaattagagcaactatttctgacaccttattgttatcttaaaagtgactgtcagctgcccctcctgcatcttctggcacattcttagattttcattttaaaagcaggaaaacctccactggtatcctctctcctcagccactgacggcttcgtaagccactgttacgccctgctcccaggttccaaatgaatactttggcatttcttcagacgtgacactttataataaagccaaagctcagaaaaatcagaaaaacaagcaaagtgagatttaggaaagagttgatatgatatctaattttggactattgtccccttaacgtttaaaggtttctttatagctttgtgtgcaaagtataataataataatagcataacataatgcttttcatcttcaaagcactttgtaagatgttggcccaaattctttgctcaaatgcagatacaccactagtaataagcaatgggaaggttttgagagcgggtcagttcagggccggcagactttttaaaatcctcccgtgagactgggccaaaatgatactaagaaattctcagccccaaagtgaactgatggcccaggttaggcatgcggaggggaagagctcatggggtgttgacagagacacctgggagatggagatgaaggtgcccaaaatatctgagacaggtctcagtcaatttaggaagtttattttgccaaagttaaggacacatgtctgtgacacagcctcaggaggtcctgacaacatgtgcccaaggtggcgattgaggtacagcttggttttatacatttcaaggagacatgagacatcaatcaatatatgtaagatgtacactggttccgcctggaaaggcaggacaactcgaagtggggagggggcttccaggtcatagataggtgagagaaaaacggttgcattcttttgagtttctgattagcctttccaaaggaggcaataaggtatgcatttgtctcagagagcagagggatgactttgaagagaatgggaggcaggtttgtcgtaagcagttctcaacttgacttttccctttagcttagtgattttggggtcccaagacttattttcttataacaaagattagctgggaatcgacattggagaaaatggcttttaatgacatagccaccttcagaacatgtttaaaatatgttagagagtaaatttgatttttaaaattattctctttacccctctatcacccccattttagaatctggcaactcttccagattagttgtccgcattttcagaagaaatctttgctctctcaggtctgaatagaaccatccccataaaagaagtcctgagtaagtcagcgggctcctctctggcccactgtgccactggcccactgtggtctttgctggaccagggcaagtaatctgggacaggagcaggaggaggatagtgaataacagttgcttctcactgcaaaagtctaggactaaagtggaattgattggcactttacctaggacttcctattctcacttgttcgcaaactattttggataagtttgaccgtaagtgtgcctttggtttttaggatgaattgctcttatgttacttcactattttgcccacttgccagtgtcacttgccagtaggaatactgtacatgattttaaaaataggaaatgaggccaggtgcagtggctcatgcctgtaatcccagcactttgggaggccgaggagcatggatcacctgaggccagtaattcgagatcagcctggccaacatggtgaaatatcacccccaccaaaaagtacaaaaattagcccagcgtggtgatgcacgcctgtaattccagctactctagaagctgaggcaggagaatcgcttgaaccctggaggtggaggttgcagtgagctgagatcatgccacagcactccagcctgggcaacatagcaagaccctgattcaaaaaaaaagggaaataaagttaacaaccaagttggagaaaatatgccactttgaagagcaacttcacgtgaatcaggagaaaatgccatcctaataactattctgttttgcatttcctacctcacttctgatggaatgaacttagttgattcccacctgctgtgtttgctcatttaccccaaatactcatcctttttaatgtggatactgagataatttgtgcacgaacaattcttaagatctttgaatatctcattaaaagacactgatttttctgtgaactgaagttctttattcttattttatagatgtgccaaatgggtttcatgttaacttggaaaaaatgccgacggaaggagaggacctgaaactgtcttgcacagttaacaagttcttatacagagacgttacttggattttactgcggacagttaataacagaacaatgcactacagtattagcaagcaaaaaatggccatcactaaggagcactccatcactcttaatcttaccatcatgaatgtttccctgcaagattcaggcacctatgcctgcagagccaggaatgtatacacaggggaagaaatcctccagaagaaagaaattacaatcagaggtgagcactgcaacaaaaaggctgttttctctcggatctccaaatttaaaagcacaaggaatgattgtaccacacaaagtaatgtaaaacattaaaggactcattaaaaagtaacagttgtctcatatcatcttgatttattgtcactgttgctaactttcaggctcggaggagatgctcctcccaaaatgagttcggagatgatagcagtaataatgagacccccgggccccagctctgggccccccattcaggccgagggggctgctccggggggccgacttggtgcacgtttggatttggaggatccctgcactgccttctctgtgtttgttgctcttgctgttttctcctgcctgataaacaacaacttgggatgatcctttccttccattttgatgccaacctctttttatttttaagtgttgaagctgcacaaactgaataatttaaacaaatgctggtttctgccaaagatggacacgaataagttaattttccagctcagaatgagtacagttgaatttgagactctgtcggacttctgcctggttttatttgggactatttcatctgctcttgatttgtaaatagcacctggatagcaagttataatgcttatttatttgaaaatgctttttttttttttacgttaagcacatttatcttgaactggagcttctaaaatgggccccaggggtgcaagatgttggtgtaattcagagatagtaaaggtttatcgcagtgtgaattataagagtccatccaaatcaacgtcccctccctcctctcatgcgatccaggtaattatgcagttagtgccacagtagactagcctagcaaagggtttgctccttgctgtctctgactgcaccacacagctattgatggcagctgaaagaaagtggatcatgccttaattttaaatattcctgtcctctggttattattttaaggaacttcatcatgttaaaatgacagcattcaaaggtgtaccacaatcaatttatcaaggaaataaaggctattgtaaccagagatttaatgcattcttctaaatgtaaatttaaaatttgccctttaaaaaagtccactttccccatatgcaaatgttaataggatttttatggggattaagaagcggcaaaactacagaagcagaattcaaagtaatttaaaaaatacacaccagttttaaatcaagagaagttgtaatctcttgttttaagcttgcgtttgagggaaaatgactttttcaccaatttaatatgcattgttctgttgtttttatttatgattgatcattatatgtgacttgcataaactatttaaaaaaaaaaactataatgaccaaaatagccatggctgagaaacacagtggctgggcagttcaataggaggtgacaatatgacaacttctcaagcttgggaactcaccagactgtttcctcctttaggtaacagattctgtcccacggctaaacttgtctttcacgtgggaattgcttttgtcaaacgtgaaagagtaaacaatagcatttccccagaatgccagttttatggagccccaaatgctctgaaaacaattagtaacctggaagttgtcagcccaaaggaaagaaaaatcaattgtatcttgaaattttacctatggctctttggcctggcttctttgttcattataagttagtgtgttccttcaggaaacaatgccttaataccatagaacatgggggccttaatagttgctaacattaaaaaagcaaacagaatgattgagggatccttatgaaaacaaaatggtgaattggacatgcagaacctaccatttccttcccctgtttgcaatttttgtggggaggggaggatgttagtatttacaaaagatgattttaagaacttccaagagatgagtttaagaattccatagagtattagttgttcactgtgtaattaatccttccggagagtctttttttttttttttaaagaaacttttgggtgggttttgttttttattagttaccctaggggtatgttaccctggggtatgaagggaggtgaagataacggaggggggagaaaaaaaaaaggagaaaaaaggagcctaaaatggggaataattgaaatggaacagggggtgtgaggctggttcctcagtccccattccaaacggaggatagaagctgtgtatttatgtgacctggcagatctctggggccataacactgaaaagtgaaagaacctggtgggcagctatctttggctactgataaccagcagaaatgtctgttaattctgattttctcaatttgaagggatcagctacactgttaaattttggaaagccactacctacttccatcaagtaacttaggtttcgaaatatgggttcaacgcacctcccttattcaaaatgtcaaaatagattattataatgtataaagtaagaattgacaaaatatgattcttgggttgattggtcatttagaaactagccaaaagtgagacttttaatgtagaacatttttcagaaatgggtacaaagaaaaatgcatattactgtatatttcagagtgtttatgtgaaccttgtatttaattgagagtcccatgtacgttctgcagcctttttgctgcttctatcatctgaagtttgtgtagtacaaataaggcctttgggattcttaatgacatttatgttaaaatgttctcttctctttaaacaccgttttccaatccacctgtcagggagtccaaatcgtgtctgtgttgatgatgctatactttgtagctagaaaaacaattttagtgttgtgggctctgtattcagacttcctttttacaagaccgatgggcagtgatagattattttatcatatttaatgcatgggaaatagtgtgctgaggaagctattaaaagtataactcagtgaattgggtctgagttttaaatgagatatttcaaaattggcttgccactgtaaaagcgactaaataataatatgatactgttctttatgatcttgtcatgtttcactgatatgtttggggtcttcactatgtaaaaaatgtcaaaattgtaatgagcaagcatgtacaagtagtcgtaaatcaaaggttttaaacaggactgcattttcaattaggaaaagctgtttggcagatagcatccaatgcaaaaacagaaatatcgtaacgttctgcttagtgggcaagataagataggaaagacatgctcaaagaggcaaaagaatcattgctatcattcattctacactagtttgaagaagtttttgtacatcagagcacttccttcagcacacttttttgccttcagatttcattttttataaaatgagaagactaatgataaactgtagaaatcaaaatttattgagaaatctgtttctcctaacagatagtaaccctgccatgatatactacttcaacaatgttataaaatttatgtgataatatacattttaacctgggatttctaaattgctttaacaaatgctaatcctgagagttgccctgcaggactcaaaagggaaaggttttgggacgtggcagaaccctgcagggacatggaattaaggccattgcaatgtatcatctttgtagcattgtcatcactcctaagctgccttcacagttttagtacactaagatgaggaaatcgaaaatgggcagagaaagctcatactgtataattgaagacagtgacagagaacgtgtcagttatgccaaaactcttttgatttctgttccaggatttccaacaagaggggaaaggaatgacttgggagggtgggaaagacattaggagttgtttttattttttaccttggaagctttagctaccaatccagtaccctcctaactagaatgtatacacatcagcaggactgactgactacttcattagagatatactgtactcattgggggccttgggggtactgctgttcttatgtgggattttaatgttgtaatgtattgcatcttaatgtattgaattcattttgttgtactatattggttggcattttattaaaataaattgtattgtatcatatttgtatgttttaagagaaaataatataaaatacaatatttgtactattatatagtgcaaaaactacaaatctgtgcctctgcctcttgaattaattctttggttgcttgcatttgggaagggaatggagaaaggaaagaaccaataaagctttcaaagttcaagaaattctcctgtttggtctgctgccttacaacttaggttactgacagttgagtaacacaaacacgcccccacaaatacatcaatcaaaactcacacaaaattatattagcctatcactacagcactatatatttatataaaaatcattacaagactatacacaaaatcatgtttttgatttatagcttctaaactattatgcaaaatccttgagttttagaaaagctcctctcaaaaaaaggaaggaaactagctagctaggcaaaagcctttgtattgaaatctaaaaatacaaaatctagtccttgatttcactgtgttgtaataaatttcaatttatcgtagcatcttattaaagtagaagcagcaggttaatgattgaagagaaagtgaacaaatgaaaatgaaacctaatagttgagttttgctgtttctctgtatattttaaatgttgatatgcatagacaatacaagaataaagttgacgagtaatcacagctccctttctttcttcactagatcaggaagcaccatacctcctgcgaaacctcagtgatcacacagtggccatcagcagttccaccactttagactgtcatgctaatggtgtccccgagcctcagatcacttggtttaaaaacaaccacaaaatacaacaagagcctggtaagagacttttttttcttccatttattatttctcatctttcatcagcccccctttcccttaacagtcccgtcacctgcttccagtatgtatagacctacttgctgatagagccccaaacactgggatctggttcatgctgatagcaatgtccagtgaggaatatttgggccagttcctatgcagaccatattcctaacccatagaaagatcctgcagaatctattcagctggaagtctttaaatagtgcattcagaaagaaatgagaagagccatgtagaaaatgattcagttcaccatgacggctgggaaagtgagcagttagtttcttggctttgaggtattgtagaacttggaacacctggcatatgtgaagttcagaaaagtagatttataatctcgttttctttctttcttttttttttttttttttttgagatggagtctcactctgtcaaccaggctggagtacagtgacaccatcttggctcactgcaacctcctcctcctgggttcaagctattctcctacctcaaccatccaagtagctgggcaagtagttgggactacaggcatgtgctgtcaccatgccaggctaatttttgtatttttaatagagacaaggtttcaccatgttggccaggctggtctcaaactcctgacctcaggtaatccacctgccttggcctcccaaagtgctgggattataggcgcatgccactgcgtctggccagtttataatcttttaaattcatctacgcagatgttaaggatttggtaaaaagaaaactttttaaattgtgtttgatcatactagtaaaaaacataaatctacaccagtgggtataggtttattttctttcaacaatacatatagtgccatgggatccgtgggaaattggttccagcaccttctgcagattccaaaatgcactgatgctcaagttccttatataaaatggtatgacatggtatttgcatataacctacacataccttcctgcatactttaatcatctctaggttactttttttgtttgtttgtttgttttttgagacagtctcactctgtcaccaggctggagtgcagtggcacgatctcactcagctcactgcagcctccacctcctgggttcaagcgattgtcatgcctcggcctctcaagtggctgggattacaggtgcccgccgccacacccagctaatttttttttttttaaattgagacagagtctcgctctgtcgcccaggctggagtgcagtggtgcgctctcagctcactgcaagctctaccacccaggtcacgccattctcctgactcagcctcccgagtagctgggactacaggtgcccgccaccacgcctggctaattttttgtatttttagtagagatggggtttcatcatgttggccaggatggtcttgatctcctgaccttgtgatccgcctgcctcagcctcccaaagtgctgggattacaggcatgagccaccacacccggctctaggttacttttaatacctgatacaatacctacacatcatttcatgtgaactcaatgtagtacttggtgcgtgaaaagttctttggtttttggaacttgtggaatttttttgttgaattcacagatgcagatccacatatacagaaggctgactgtactttttttttttgagatggagtctcgctgtgggctgactgtactcttaaaaacaacgagacttaaaccaataagtataaacactgtctattgcctgcttcataaatctgtggttaaataagagtacaatgaaattatttatgattttaattgatattcatattttattaaaaataaaattgccatttatttccaatattccaacaatctaaatcaaataaacagcaatatggagtagtccttaaatgtaagtcctctacacaaaatgaaacctccatttgagtttgatgcacagaatggggttgtggtataacaactccaaattttaagatatctgcaaatgtcttagagagaccttacactcagcaggttcaaaaccaatcacatcacttcatttttctccataaagtagcacctcctcttatactgacatcaaatatttaatcatccaaactagaaggtgatggtctctcctttgccctcttcatctaatcaatcaccagactgagcagattacacctactaaatactaaatatttctcaaatccattcctttctctgcttccccattattctctcggtccagacactcattacctagcctctgaacaccttcagtggtctccaaacttgtctccctatctctctttgcatctactttcaacacaacagtataaaatgcagctgtgaacatgtcacttccctgcttcaagtcttccaccggctccaactcttcaaccctaacacacttcgatgaagttcaagaatctgacagagaatgccctcaatatctagcccctgcctactcctacgacgttatgctcagagtcgcctgacttgaattttataactttatattccagcagtgccaaactctggtagatcactgcagacattatgctgtttaaactccctatgctttctttggttcctgtttactctccgcctggagtaccttcccttcctttgtcgcatcccttaagacccagattgggtgttctctctccaactaggccttacacaactcccacaaataggaggcagatcctccgtgagtctttattacttataactgtttctacttctctcttgctgagacttttaaaaatcatcagttcatgtgtgtcagtattacctatgcatatttctactcctctcttatgtatttttttaaatcaccagttcatatatgtctcccctccagagggcagatagatagtttatcttatttgtcttatttatgtcttgtcttttcatcttcagaacctaacacagtacttgacaattaataaataaatgttccatgaatgaatgaataaatggttttcagaaaatcttaggctatccttagcaaactcatagtggtagcacaaaagcctcgatttggcatgggggtggggcccatatcatggaagttttaaagctcaagggacctttagagtatctttagtctaacatgtagaatggaaaacttaggctcaaagaggtaaagtgatttgcctaagatgacacactaccaagatgggtagttttgtggaaagctagtcccttgagaggttctcccagaataaaaggatgaataaatacatgaataaatagcttgtgaaagaaattggtaaactgtactaagtttttttgtttttgttttgtttgtttgtttgtttttgagatggagtcttgctctgtcgcccaggctggagtgcagtggcatgatcttggctcactgcaacctccatctcctgtgttcaagtgattctcctgactcagccttctgagtagctgggattacagacatctgccaccatgcctggttaattttttgtatttttagtagagatgggggtttcaccatgttggccaagctggtctcaaactcctgacctcaagtgatccacccaccttgacctcccaaattgctgggattacaggtgtgacccaccgcacagggccaactgtgctaagttctgtattcctcaaacttacttgatcacaaaatccattttatgaaagattagtgtaggatgttgagtgattctttgaaagaagtaaatgtgaaataagttcagtttttataatttggaagtgggttaaagaatcagagttaaaatgatttgggaagcttagaaccattatgagactagaggagagacaaggcaagagaatgtgtctcagcagctaccacatgcaaaaaaagagtccagtgtgctggggagatcagggcttgagtcctagcatggccctcatgagtcatataagaatttgggcaactcattattccttactctcggagccctttttcccctatttataaaattgggataattctgaccacacagggatatggtaaggtttaaatgagttaacgtaagctggcccatagtcttggcttgttcaatgctgccttctgacccacctcatttatacagaaattgtccagtgagttggcagaattcactggaaggcatcagagttaattaataagctcaaatgtcaaacaaccctaaaacaaaataatacagattctccccccaccacccctccaccacccagctttctctgatcttctgagggccaaaccaaaagaataatatctaaaaacaggtcatataaagtcttacacaaaatattctataaatatcattctaggatgctactatttagcaatttagcacttattaagttcagctataccaagtcagcaattttctttctctcgcttccttttattcactctgtaaaaccactatagcctttaggaaagggctttcttaattttctggagataatcttccccatgtatatagtttctgtaaagttccatacgtaatattcccatttcaggagcaaatgcaatagccaatgcaatatgctccatgacgatgacccttatgtttgtatatatgagtatcttcaaaactgccaactcttttatgactatttctttttgtaaacctatgaataaaggtaaccaaagtgataatccctgattcgccaattgttgcaaaactgaaatggaagagtattaagatcatggcctgcaaagactgaaaagtagtttgttatatactcagcctttagccagcttgactgagttttaaaaccctgaaaataaactgtgtgtcctttagatacttgaggtgcaccttttagatgaagcctggcagctcaaaaaggattgatatagcaagagaattttagtgaccttggatcattgataggatccagtccattatcattgttattttttaaatgatgacttgctcccattccaaagaaaatattagagaggaagtgaggcacacacaagggctcaagctttgtacaagcgcctataaaatgcctacttggggtagttggagctttttcctcccttatcatttcctttcaggaaaaaactgtcagtggggcacagccattcaccagaagaaaggcagttttaagaaagtgttataaaagctgagtagtaaattcttgagccaaagggcatcaagcaggaataaaagggatcttaagcatgcaggccctggaacgcatgtgaacggattgcaagagacaatcttggccagggcaacccaaacaagaagagacagggccttgcacaccacactgcctgagtacctcggggttggcatgctgtctgctgcgcgtgcccaactcccagcaccgctgtcaggcttctcagggcttcgattgcttggccccatccagctcgttagcactaacttcctgctgcgccctgacaccactcttcctcactttttcctttctcctcttctcccttcggtcctctgggccatgggctgccttcagttcttgcctgaaaaattctctttcctctcactacgttattctcctcccactaatgcttttttgttttgttttgttttttttgagatggagtcttgcgctgtcgctcaagctggagtgcagtggcacaatcttggctcactgcaaactccgcctcccaggttctggtgcttcagcctcctgaatagctgggattgcaggtgcatgccacaacgccaggctaatttttgcatttttagtagaaacagggtttcaccatgttggccaggctggtcttgaactcctgacctcaagtgatctgcctgcctcagcctcccaaagtgctgggattacaggtgagagccaacacgcccagccccactaattcttgatgtcgtgaaagatcttctctcaccttccagggaagtgattcttccttttttctgatgtctaggtttatttacaactcatgtcattgagcacatcacttcattgttctctggtgttacatgtgtttattttataatatcttaatatgtcttctctattaaacatagcaatataagatttattgagcgtttaccaggtaccaaggcaccgtgttaagtgttttggagataactcatttaattttcacaactatcctttgaggtagggacattattagatacattccacagatctgttttacttaacaagcacctgcgaggtttctgctgctgctttagaacttacctaatgctaatttgtttgcttttcattacaattctgtgaggtttgctgaatgattctgaccgttttacagactaatggatgaggaagctgagacatagagaggaaaaataactggtcccaggtcatagagttagtgagtagccctccaaggttcagaccagaagaatttgactctgaagcctgcactctgcacactgaacatatgggcatttagcattgagcataactaaatgttagctcacctcactcacaagagaacaaatgagcatcagttttaaatgatatagtgggcaccaataaacatgtatttaaaacaatgaatatctgctcattctcagcccttaaagattaagtctcggtcaggcacgctggctcatgcctgtaatcccagcactttgggaggctgaggcaggctgatcatgaggtcaagagatcgagaccatcctggccaacatggtgaaacctcgtctctactaaaaatacaaaaattagttgggcatggtggcgcatgctgatagccccagctactcaggagcctgaggcaggagaatctcttgaacccgggaggcgaaggttgcagtgagccgagatcacgccactgcactccagcctggcaacagagcaagactccaactcaaaaaaaaaaaaaaaaagattaagtctcttgaagacttcagtttatttaaagcatgttttgaaacattttaaaagcatattaaaatcacataaagcattttttttaaaaactagacatgccatgtataaaggtaaacattattctgaacccagattgggggttacttttaagatataaggtaaattaaagattaagtctcttgaagactttggtttctttaaagcatgttttgaaacatttttaaagcatattaaaaacacataaagcatttttaaaaaactagacatgtataaagtttaaaattattttgaactcagattgggtgttacttttaagttgtaaaggtccagaatgcatgtcctatcagcctaatactcatatatttacttatttaacaaatatttataagtcactgctttgtgtctggcactgcgctaggctctgcaaatacagcagtgaacaagaaaactgaaatctgaagaaccaaaaatctagagtaattaagtgatgcatgtatttacctgaaatacgcttcttcaagcaacaaccctgtgtgtcctgccttattcgctattatcgtgtcaattggtctaaaaatggaataaggcaaattaataaatgggcaatcagaaaaattctatggctcaatcatggtatcaaaatatctttaatacattggatagctgaaaagatacaccctttgtgctttaattttcctatgttcatgctgtgcatacaataagttctcaattgttgttagctgtatatacagaaaggaggaagagataaggggaaattagtaggggctccaaattagaactgagtaaagaagcaactgggaactcttagaagggactgatgtggtgcaaagtgttgaaagatgaaggtaatttaagacctatttactttgaagaggcaggtgaaaagagagtagacaagctgaagtgaatataatacagagagccagagataagagaggaaaatgcagtgtgaagggactaataccaagaagcaccacacaagagttcaaagtcagagatgaatcctgtttgacagtagttgctttgagtatggtctgattcctaggggtacatggacagcaaagctccttttagaaacatttctttctgttgggctaaaaatatttaaggtttgcaaaccagacttggaacaatggtacagtgtcaccttggagaacccttgaccctgagtgtctttactccctcttcaggccacccgcctaaaggactggcagctctccaaaataatcaaaaagtctcctttctaccttaccctcttcccaggttctccaatgaggtcgtaaaatatttcaagttatgacattgctgagcaggtgctgcaagaggggctactggcaaccctcttcacagtggcactgtaaggaagtaacataagttggccaagaatatatggcagaaggcctatctagtttaggtttgcactgacacaggcacaaaccatctcacaagtgattgtgctctgaaagagtcattaaaaggctgaaaaaagtaacaaaccctccctctctggaaatatttgagaaaacagaaggcaatcttgatcttagatgttcttagtaaagcctgcctgaaccaataaaccatcatcaaactattatttaagctaaatttttatgatagcaaaacatttttagaatattttaaggttaaagcagtagtattagaacaacaaagagttcagaaagagtaaattctgtcttaaacagactgagggtggagcaggagagaatcactctaacccaatgattaatactccttcttaaatgaaatcttcttgatcactaggactaagtgtttatctaactgttagaggacatctttcctgtcacactatatcactgacaccaaatgtctgcatctgtaggcaccatattcagatcctagtacctaagaggacagaatcacctctgaattatcaagtgatttgactagatccaggaaagatcttaaggaaccttagaagagagagaggaatgaggctgttaatacccagggatgaaaaactgaccatctgtcacgctcaggctactagaatcagcagttttgcttgattccttaatcaaattccttaatgaaattcagaaatgtcaaatatcttttgcaaaacttgagttgtagttgccttttccttctcatgaaatctatccttacggtacacaatgaatgaagaactattattgcagaaaagaaatgtgaacaagatatccagggtgtgcgcagagcagtgcctgtgagggtgagctggctgctctacttagcacccctgagaccagagctgatctgctggtgtgattagctaagcagctgttctcgctagccctgtctcttcaatatgtgtcattaaggtcaggggctctctacatccagatcaaggaaaaccaagcttcactgctgatatgcaagtagctcttcttccctgccaggactatgttgcagaatcaaggctcagttcttttccaaggataaagttcttttaggaggtagaagaaaggagagtaatgaagtaagagaggtagtggggtaacagcatgcgaaaactaacctgttgacattgccaaagttcagacctacaacactcatctcagccaacagagggaacctgactttaacacagccctatcatggcaaaaaaaaaaaaattgaaaatgttgctttatgcgctttctgcaattctgcaattacttgttaatgtttggctagttcaatgagattgaaaagtacagtggtagagttctataatttatattcagaaaagtaaagtaatccatgagtaaagttccattttgaattggaaagcaatagaagctatttatgaagaatcagtcagccccaaagtatctctttttattggcaagattcaggtgatttaggtcttgcacctacatgcataggtatacacacacatacatagcaatatatcctatcctaaagctttgcctaaagaaaatttcctggatgcattttacagcataacatcctcatctctattcagcccagaaaagcctcctgaaagctgctggccacagtaaggtccaactgagggatcatgcattggtcaacacaaacatctattcgtatgaatagcagggccccctgctagttgtttaagtttagtggtggtggtagtggtggtggggtgtgtgtgtgtttgtttgtgtgtgttaggtcctattaaatttttaaatgaaaaatttaggacataagaaataggagggccgggcacggtggctcacaactgtaatctcagcactttgggaggccgaggtgggcggatcacaaggtcaggagatcgagaccatcctggctaacacggtgaaaccctgtctctactaaaaatacagaaaaaattagctgggcatggtagtgggcgcctgtagtcgcagctactcgggaggctgaggcaggagaatggcatgaacctgggaggtggaggttgcagtgagccaagatcgcgccactgtactccagcctgggcgacagagcgagactccatctcaataaaaaaaaaagaaaagaaataggagagaacttgtaaatgtgggcatcactttagaaaaagggtttttttgggttttttctttatattttgttttgttttttgtttgttttttgagacatggtcttgctctgtttcccaggctggagtgcagtgacatgatcgtggctcactgcagcctcaacctcccgggctcaggtgatcctctcacctcagcctcctgcatagctgggactatagtcacatgccaccatacccagctatttttttttcttttgtagagatggtggtctttctatgttgcccaggcctcatttttttaaattgtggcaaaatgcacataacataaattttatcattttaaccattttaaagtgtacaattaagtggcactaagtacatttacaatgttgcaaaaccatcaccactatctagttacagaactttttcataaccccaatcggaaatcccatgcccattaaagcttctccttttttgactatgaattaacctcctcttttgattctctctgtgacctcttgcaacacacggaaatgtactttgaacatggccaagatcagcagcaaattttgtctgaagagcagtcaatggctgggaaaaagaaatggggcatgaagaaaaacaaagagaagagatacaaagagatttggggacatcgaggggttagtgggggtggtaaactctcccagcagtcatcccagagatctctcagaggctgtactctgtccaaagacactaaccccaaaactaagagccagtgcctgggctcttagagtgagagggatctcaatccctaatcaacaaattcctccctacactaaagattggatgactacagaaggaaaactcatacactcccttaaacatgctttcatgctttcatgtttttgcaaaataattagatggactttttccattttacatgtctagaatctgcatggaaatctctcctcccctcaagcataaacttcagacagtttaatcaggacctaaagtggcacatacacagcaatgcaactggggtcaccactatgcccaattcaattaaggaaaatatgcaaacaaatatactctcagataactagtcagtgaactcagtccacgactctaaattgctgctgaaaaaaatcaaagtcaagaaagttcacctccccattcaaatgataaacctgatttttatataatctcctgctaccaaggagacttaaacaatcaagactgtatattagtttaagtagccatctcatacaactcagtcataattaaactgagcatcactgagaaacaaaatgaagtgcagaaaacatactctatatcacgttccctcccccacctccacacggtgggacagtcttctgactgaatgggttttgatttgtccttttattgccttaatctaaaattgtaaattgtcataaaatataaatcgacttttcttgcctcaaaaacattcactcactcattctaacatagtcaatattacaaagttttgcaatgtttaagtatttgaactcatatagcttttaaacttttcatttaatggctctttgccactgagaaagaggtaaaaagggctacagtttcatgtcttaatgtttcatttttattttatttatttatttatttttgagacagagtctcactctgttgccaagctggagtgcagtggcatgatctctgctcactgcaagctccgcctcctgggttcaagcgattctcctgcctcagccttccaagtagctgagactacaggcccgcaccaccatgcccagctaacttttgtatttttagtagagacggggtttcaccatgttggccaggatggtctcaatctcttgacctcgtgatctgcccaccttggcctcccaaagtgctgggattacaggcatgagccactgcacccagctatatatatatatatatatatatatatatatatatacattttatttaaacgaggaatatatgaatacatttccactgtacagaaatagagtaagctatacaaatttcccttatggagaggtaatacatattaactgtttgatatgtatcttgtcaatgttttttccattttttaacctatacgtgtgcatatgtacaaatgtgggctttaaaaatatatggccggatgcagtggctcatgcctgtaatcccccagcactttgggaggctgaggcaggcagattgcctgaggtcaggagttcaagaccagcttggccaacatagtgaaactctatctctactaaaaatacaaaaattagccaggcatggtgtcaagtgcctgtagtctcagctactcaggagactgagctaggaggattgcttgaacccaggaggcagaggttgcagtgagccaagatggctccactgcagttcagcttgggaaagagagcgagactctgtctcaaaaaaaaaaaaaaaaaaaaaaatatatatatatatatatatatatatatacacacacacacacacacacacacacacaccaatgatttattcattcaatagatattcactgacagtcaaccttgtgacaggcatattaggtgctgggaacaaaacagggaccttgaatttacattctaatgggaaaatacaggcaacaaatttaacaaacaaaactactgtcatgtccccttatccacaggggacctgttccaagaccccaagaggatgcctgacacctcagattataccaattgctgtccatcagaacacgctctgttcatgccttctacccacaaacttaaatgccttttcaggtttctttttccttctttccaatttcatggatagaaggttcattcttaccatagatcttagccaacctcagcatatgatttttttgttttcttattaagttgagaactttcaccttttaactaaaaggaagtacttcacagcttcatcactattcgtgtgctttggagcacattattgaggaaaataagtgttctgtgaacacaagcactgtgatactgggaccatctatctggtaggccagccagctcctaagggattcatagatgggtagcagctacagcgtggagatgcgtgcgggacaaagggaaggttcacatcctgggagggacagagtgagacagcgagagacttcatcatgcttctcagaatggtgtacaatttaaaacttataaattgtttatttatggaattttccatttaatatttttgcacgttggtaaactaaaaccacagatacagggggactactatataagcatatggtataagttctgatggtcatcactgttatgatgaaaataaaataagataatggattacagtgagtgactggtagtgggcttatatgggaaacccagcatttccgagataaaatttgagttaaggtcacaccatatgtcattttaagacttgcttttattacttgatatatcttggaggtctttctatgtcaaaacgtattgttctaccccactctttttagcaggcatacactgtaatatgatttgtattcccataacttatgtaactactcctctattgagagaaaaacactttcttgactaagttcttatggagtgcaatagtactgattttcctgtcttaaaatggtcattagagtcgctacttcatcacacacaaaaaaagccctgtaggtgactggccatcttcttcgggactaatggatccaaccttgtggataggctatggccaatctgaacatagcacaaggattaattgggacaggagtgtgtgggtgtgcgcacaaacttacatgcatgtgttcacagtttacaaataaacatagctgatagctaaggttatatagataataaccatagagttaggaccatttgacacatttttaagtgcctgaatcatcctgaaatgctttattagaacaagagcaaagttcacagtgaaagcgcacaaagatgctttcattttaaatatttagaaatacgtgtgtttttggcaccgtttcaaaggattcattttaactatagcctcttcaaggcttttagaaactattctgctatcataactccatttttttattatactttaagttttagggtacatgtgcacaccgtgcaggtttgttacatatgtatacatgtgccatgttggtgtgctgcacccattaactcgtcatttaacattaggtatatctcctaatgctatccttcccctctccccccatcataactctattttgtaagttaaagtagtgaaggaatagacattatcccaaatgaaaggacctttgtctatggtgtttcccttattcagaggttacagtgagaagaatattatacagcttttttttttttctttttgagacagggtcttgctctgtggcccaggctggaaggcagtggcgtcaccatggctcactgcagcctcctcccaactctcccacctccccaagtagctggaactacaggcacatgccaccatgccgggctaattttttttattttttatagagacagtagtctcactgtgttgcccaggctggtcctgaactcctgggctcaagctgtcctcctgcctctacctcccaaagtgttggaattacaggcatgagccactgcacccggcctatatggcatttttcatcactgtccccagtcttattcttttctaagtgttcctgttctttctctgtctttttcatggctaaagcgtaaatcgtcttatcagggcttacactgccatcaagtctcctttagacgctatgttttgcaacattctcatattctcttccagcttaacatattattgcaaggctgcttttcactgtgtctcaaattatcccatacgtcaactttttttcttttttacattcacaaaggctttgccatgaggcttgatcttagggtgaaattctcaataaagaagaaaccacatggtcaccattcagaagcactgaaatcactcatctttttagtgtcatttatggattaatcgtttttcattttccttttcttttttggagatggagtctcgttctgtcatccatgctggagtacagtggcatgatcttggctcactgcgacctccatctcctgggttcaagcaattctcctgcctcagcctcgtgagtagctgggattacaggtgcccaccaccacgcctggctaatttttgtagttttagtagagacagagtttcaccatgttggccaggctggtcttgaattcctgacctcaggtgatccgacccccttggcctcccaaagtgttggaactataagcgtgagccaccgtgcctggccttcattttccaattttgtcagcctttgccattttactcaacttgaatttatgttcctcagacatagttttccaaaaatccaaagtttgactggatatataaaatctcctttgtggaaagtcaatctgacatcttgcctctagctttcctgggtcacttttagccatttctatattttggctcttctggttcttagttcggacactgctcttagctaatcaattaaaggctgccaatctagccaggcacagtggctcacacctgtaatcccagcactttgggaggctgaggctggtggatcacctgaggtcaggagttggagaccagcctggccaacgtggtgaaaccccatctcaactaaaaacacaaaaattagccgggtatggtggtgggcacctgtaatcccagctactcaggaggctgaggcagaagaatcgcttgaacccggaaggtggagattgcagtgcgcagagattgcaccattgcactccagcctgggcaacaagagcaaaactctgtctcaaaaaaaaaaaaaaaaaagctgccaatctaaagatatgattatttactgtgtacctagaactgtatacatcaacgtcaccatcgtcatcgtcatcatcaccattgtcatcatcatcatcatcgtcatcatcatcatcatcatagctatcatcattatcatcatcatcatcatcatcatcatagctaccatttattgaaaactattatgtgtcaacttcaaagaacttatcctttagttggagagccaagacaatcataacaataacaaatggccgggcatggtggctcacgcctgtaatcccagcactttgggaggccaaggcaggtggatcatttgaggtcaggagttcaagaccagcctgaccaagatggtgaaatgctgtctctattaaaaatacaaaattagccaggcatggtggctcatgcctgtaatgccagctactcgggaggctgagacaggagaatcacttgaacccaggaggcagaggttgcagggagccgagatcgtgtactgcactccagcctgggcaacaagagcgaaactccgtctcaaaaaacaaataaataaataaataaataaacagacaaaattcactttttattctattaaacttaacatacatgcattaattgcctactctgagcctgatcctttattatattctagagaaaatgaaaataagcaacacataatcctcacctttgaaaaacaaacataataggtacaaagtcagttcataaatgtgcaatgtgagtggtataaaataacatcagataaaaattagcacttctgatgactaatcaggggagatttcatggaggagatgtcatctgaattggactttgatgaataaaaaagagagttttgatgacgaatattagtttggccaaagtggatgaatataatgttctctaagtcaacaatacatatagtcaactgagcaacaaaacagaagttgctggtcagactagtaggcccatttaggagagcaacaagccacttttgtgtgtgggggggaacaggaggcaaacacatggcctgcatttatgtaatcaaataggtgaattcaaaagctctacagatttatttactcaatggtgaattggattaaaattatattccatgctcttccctgggcaatatggtgctcacacataaaatgccaagattgtccttcaccttaaggtataatgggaagaaataaagctatctacagagtcccttgaaaattacacctttaaaattgacagttggacatcttgaaaatttagaccacatcccatgaataaattaggccatcatggtcaaaaacttatccacatcctccattagcaaccaacataataagtaattcaaatcctcacactgagtttcatcgtcagatactttagaggacaccacacgtttctacaaaaacagcccagtgtaaagttttacttgtccttttggggctaatgctttagcaaacgcataaaaccaccagagtttgcattctaagctccaggaactgaggctttttgaaccttaagatgacaaaattaactgacagaattttataaattctgaggtgagcttggcatgctgcaggtcatcagtctatgctaccacccagggagttagcactaataactagcttagcttcatcatattccgcaaatattgcaaagctcactcccctcctccaccctctacatgacattttccattgtcttcatttatgtggtcattttcctcagttactgaaggtcagctgtctatcggcctgcactagacactggggactcaagaatgaataagttagagttaccattctccaggagcccacagtggagtgggcagataagaaagtcagcaattttatgacaaaaaggtaagtgccagagtaggggcattcacagggtgatgcaggagtaacagagatggggtccaagagcatcagaagatgctttccactgggcgtggtggctcacgcctgtaatcctagcactttaggaggcccaggcaggtggattacctgaggtcaggagttcaagacctgcatggccaacatgttgaaaccccaccactactaaaaatacaaaaaattagccgggcgtggtggcaggcgcctgtaatcccagctactcaggaggctgaggcaagagaatctcttgaacccaggaggcggaggttgcagtgagccgagatcgtgccatttcactccagcctggataacaagagcaaaactccatctcgaaaaaaaaaaaaatgctttccagagtagctaatcctgagctgaatattaaagaacaagcaaatgttaaccaggcatcaagggaaccacgtgtgcagagtcactgaggcttagaacaaactgcaaatagattagcatggctcataccaaagacacatgtagggatgcagcaggcagcaaagctgggaagataggaaggggccagatcatgaaggtccttgcttagtaacaacataaaagcttatccccatgtacatactctaagttacatcaaatatatcttgcatccatgtttttattggccttcacagtagatctatataagttgatctggttgccaacatttaagaatcatgagctttaacattaaaaaaaaaattcaaatttctgccttctttctaaaactcagaagacaacaccagactcaaatccccaaattctcaataggttggagctaagcaaaggcttctgcttttaggtgggagacaggctttctattctccagagacatagtcccccttccattattttatccccaactcatttatattacgtgcctggctcctgaagacatctatgtttgcaaatgctactctatgccctgttggtccatctgatacagcttcttagagtaaagagaaataaataatgaatttccatgggaattgttatggcttcagtggttaaagaatctgtatttagtgtcagaagccaaggaaatacacaaacaagcacatggtaatgacttaggctatcctttagaagcaagcaagcaggcctacaattaaactatctcagaaacacaaagcagagtatcatgtttataagtgagttctggctgagcacggtggctcacgcctgtaatcccagcattttgggaggccaaggttggcgaatcacttgaggtcaggagttcgagaccagcctggccaacatggtggaaccccatctctactaaaaatacaaaaattagccaggcttggtggtgcacacctgtaatcccagctactagggaggctgaggcaggagaatcccttgagtccgggagcagaggttgcagtgagccgagattgcaccacttcactctagcctgggcgacagagcaagactccgcctcaaaaaaaaaaagggagttctacatgttagttctaaagactaatacccaaaaaggaaagagaaaattcaaatacagtgacctctcaaagacctcaatactattttgcataacaacaaaattaaaatctatctaggaataaatataactaaagaaaagcatgatatttaaagagaaaatcataaaactattaaatgacataaaagaaaacctaaataactcaaagatactcaatattcttctataaaaacacttattggtagaaccatattgccatttttgtacgtcaaagtattggcaattccatatggttccacctaaaaataaatatgaccatttcccccaaattataatataatatgaactcagtggaattccaataaacattccaattgtgctttttacagaatttgacaagcaaaatctgaagtataaagtattgaagtataaagggccaagaatagtcaagaccattttgaaaactatctggtgaggccataccagatatcaagatgtgttatcaagcaatcataatttaacttatgtggtacagggatagataaataggtcactgtgaataaataaagagcctagaaacagaaccacaaatacacaaatacatgggagcttcaacataaaaaattcagatagtatctgaacagagctggcacaacgacttagtggtaaaagaagatcttattcaataaatgatgctgggatcattggctatttatatggtaaaaattaggtccttacttcacaccatacacatacccctccccaaaagaaaatctaggtcaattaaaaacctaaataagaaaacacaaaatagtaaatgaatctcttaaacagattttatgaagaaagtatactttctttatgatatcagggtaggaaaagagttcttaaataacaaaaagcacaaaaagttaataaaaaatactgacaaatttgattatgttaaaaaatttaaagctttgtattaaaaattcaccatggcagggactgtggcttacgcctataatcccaactactcaggaggctgaggctggaggatcacttgagcccaagagttcaaggctgcagtgagctatgatcttgccactgcagtccagcctgggcaatagaaagagacctcatctcaataaataagtaaataaataaaataaaaatttaccataagtgaaatttaaaagactgttcatacaatgaaggaagacttgaaacgtattaagccaacaaagaattagcatcccaaacatataaagaaccctaaaatcgttgacaaaaagacaaataggacaacagaaaaatgggcaaaggatagaaacaggcagttcacacaaagagaaacctgaatggccaataaaaatatttcacctagctagtaatcagggaaatgtagattaaaaccacagcaagataccatttcacatcaatcattttgccatcaattaaaaagcatgagctgggagcagtggttcacccctgtaatcccagcactttgggagaccaaggccagcagatcgcttgaggtcaggagttcaagaccagccaacatggtgaaaccctgtctctacaaaaatacaaaaattagccagatgcagtggtgggcgcctataatcccagctacttgggaggctgagagaggagaatcacttgaacccaggaggcaaaggttgcagtgaaccgagattgcaccactgcactccagcctgggcgacagcaacactccgtctcaaaaaaaaaaaggataaatataaaagcattgctgaatgggaaaacaatcaagttgaaaaggatatataatctataatacctgttatttagaatttttaagcacacaaaataatattctgtattctgtacagatatatacctatgtagaaaaagtacaaaaacatgcatgtggaaaaagtacaaaaacatgtactatgtagaaaaagtacaatttcaggtacctctggagagagagggtaaaggaagggataaagtatctataaatctcatttcatattaaagacagaaatgggtctgcctaaagcaaatatggcaagatgttgacctctgatcatcttaatggtagatacatgagttatactttttctgcactttaacatttttgaaagtgctcacagtcaaaaaaattaaaattaaactaaaaatagaaccactttaaaaatgtattttcctcagcagaacagagcctgtatcctacgatttgggtcatataaagtgagtatcaacagattaaggtattagagaaacctggggagacaacaatgaattaagtatgaacaaaagatctgaagaatggagacaaattataggggtaataacatgcttattttcgtaagaagggaaataaatgcaagagtggaggatgagcaagggcctgatgacagttctgagcgtctgagtggcctatctgatggggaagcatcaatgtctctgtgtcatttgttatagtacaatagagggcatatcagaaagaagagctttgcctgttgaatttggacaccttctcaccccatctcctctcctccttgggctagaaagaggaatctgtgccagatgatgttagctcatgagcatcctggctaccatctctcacctttcataattacacactctccttgagtgaaatccaagtcctttaactttatttactcatggtgccagcctgttttttgttgttgttgttttttccaagttttagtggagatggagtctcattatgttgcccaggctggtctcgaactcctaggctcaagcgatctgcccacctcggcctccaaaagtgctgggattataggcatgagccactgtgcccagcccatgatgctatccttgagttgggatttgagtgatagaaaattggctgagtttcagatctgctgcaatggagattattgtaatgattgtaggtagcaagatagctgctcttataaatgttcattgacccggagcaactgtacagccacacttttattttctgtgattgccacttgtactatatcttatacttctcaaagcttcaatgcttccatttaagctatctcaattgatcatgaaataggtggagcaggtattattctcattttacaggtaaggaacttgccccaaaaagattaagtgacttagccaaggttatggggaagagctgtcattttttccctgttatctgggtttaaaatattggaatcaccttggactcatctctctctttttctattgctgtatccagtaaagcaccaattcctataggttgtttctacaaagtatctgtttccatttcttcctctctacttcctttcccaccatccagatttgagacctcatcattccttgcctgaattacaactgatgagcaggacttgcagatgctatgctttcctcattccagtccagctgtattctccttctagactgaacgtccttaaatgtcgctttcactatgctcaaaaatctttgtgattctctttccttctacatggaattgaaactcctcaaccaagatttcaaagctctccttaatctgaattcaccttttccagtcacctactcaaaacaggtcttttgaaataaaaatggctaatacacacatgaaaaaatgttcaaagaaatacaaattaaaacaatcattttcatctatcaaatcagcaaagttttgtgtttttaattttttagacgatactgctcatcctccactcttgctatttatttcctttcttacaaaaataagcaagttattacccttataatttgtctccatccctcagatcttttgttcatacttaattcattgttgtctcctctggtttctctaataccttaatctgttgatactcactttgtaattctccaaaactagaatttgtaggcaaggatttcttctgcttgatagtgtatcaccagtatctagaatagtgtctagtacgtagtaggagctcaaaaaatatttgttatataaatgaacaaactgtgttttcagaaagtacactttagaaagactaaagaaacaacatctgggaggtgagattgtaggtgtttggagtttgtgtgttttttacatttcttttttttttgttttttgagatggagtcttgctctgtcacccaggctggagtgcaggggcaccatcttggctcactccaagctctgcctcccggcttcaagcaattcttctgcctcagcctcccgagtagctgggactaccggcatgagccaccacgcccggctaatttttgtatttttagtagagacggggtgtcaccatattggataggctggtctcgaattcctagacctcatgatccacccacctcggcctcccacaagtgctgggattacaggcatgagccaccgtgcccggccttttccatttctttaattggcaaataataataattatatatatgcatggggtacagtgtgatgttttaatattaatacatgtatacaatgggaaggatcaaataagcctgattagcatacccatcagctcaaatatcatttctttgtggtgggaacacttaaaatcctcttttagctattttgaaatgtgcattatttttagctgttgtcactttgctgtgtaatagaatgccagaacatattcctcttatctaactgtaactttgtacccagtgaccaatatcttccctgtccgtatccaactctccccaccccagcctgtggtaaccatcactctactctctacatctatgagttcaacttttttagattccacatataagtgaaatcatgcagcatttgtctctcagtgcctggcttatttcgctcaacataatgtcctctaggttcatccatattgtcataaatgacagaatttcctgttattttttaaggctgtagtattccattgtatatatacaccaaattttaaaaatctattcatccattgatggacacataggttgcctccatatcttggctattgtgaataatgctgcaataaacatgggaatgcagacatctcttcagcatccttgatttcaatttctttgggtagatacccagtagtgggattgctagatcatatagcagttttctttttagttgtttgagaggctccatatggttttccaaaatggccgtaacaatttataatgccaccaaccgtgtataagggttcccttctttccacatcctcatcaacacttgtgatcttttatctttttaataatagctaatctaataggtgtgaggtgctatctcatttggtttttttcttgttttttgagacaaagtctcgctctgtcacccaggccggagtgcagtggcacgatctcgctcactgcaacctctgcctccccagttcaagtgattctcctgctgcagcctcccaagtagttaggattacaggcattcgccaccacaccccgctaatttttgtatttttagtagagactgggtttcatcatgttggcgaggctggtcttgaactcttgacctcagatgatctgcccacctcggcctcccaaagtgctgggattacaggcatgagccactgcacctggcctcatttggttttgatttacatttttgtgattggagatggtgagtatttttttcatataactgttggccatctgtcttcttttgaaaaatgtctatttgatttctttgcccatttttaaataggattattggtttccttgttattgagtagtttgagttccttgtatattttggatattggctccttatctgatgtatgatttgcaaatactttttcccaatctgtaggttgtctcttcactctattaattgtttcctttgctgtgcaaaaggtttttagtttgatgcaatcccatttgcctatttttgctttcgttgcctgtgcttttggggtcatatccaagaaatctcttcccagaccaatatcgtggagtttttcccccacattttcttctagtagttttatagtttctggtcttacatttaagtttttaatccatattgagttcatttttatataagggatgagagaagggtccattttcatttttctgtatgtagatatccagttttcccaacaccacttattaaggagactgtcctttccccattgtgtgttcttggcaccttgtcaaaaatcagttgaccatagatgtttgggttgatttctgggcccttgcctattccattggttgatggatctgtttttataacagtaccatgctgttttgattatcatagctttataatattacattttctttttttaagctttcaaatatttctcaacttttctatattgagtacatctttcataagagaaatacaaactatttaaactaatgaaatacagcctatagtctggccaggcctgttttatcactattctggaacaagtactcaattcctgtttatttccacatcatgccatttctcatgcttccgtttctcatttcacctctgacaatccttcagacctcaactcgaggcccacctcttctatgcagccttccccaagtacacccttccttactgatctccttccctgtgccagaccttccacttaattaggtatactgtgctgtattcactcattctcattcattaaacattttctatttgttggcttgtgtgtgtgagtgtatgtgttgagcatgtgtgggagagagagaatgtaaatgtgtgtgtttggtaggaattaatttttccttctcaacagataccatgtcttagcctgcccacatcttagcctgctgtttgttttgtaacacgaactgatggcagagtaaatactcaacagacccttggtgatagtacaaggtattgaagcttcaaggtcttgaagcctttcaggggtctgaaaattcttgggactccttccactacactgtgctctgtagtaatccttaagcttacatttactgagcacttactatgtaccatgggcttgccatttactatagagtaagaattactttcatttttatcttaagattaaggaaactgaaacttagaaagatcaagtaacttgcctaagtgacaaagcttgaagcgctaaggcatggattaaaacacagcccaggcaaactcttcatcactaggctatattgactcaccaggccttatgacaaatgaaatattagttcctttgacccatatgtcacaaatgtgctttcagtcaaactgcatgctcttggtgaagttacttaatctcacagaatctcagtttcctcatttgtaaaaggaagacaatattagctgacaggctggttgtaaatgtcaaggtatgaaagtgtgtcacatagtgccgagcacacagagggcgttgagtcaatgatagttgttattattagatatgctgccttcttgatatcttcaactttcaagttgggcatggcagctgcctcacatttctttctacagggtgggtggatttgcatctccgaagctggggatcacagctctgctgggtggtgaaggtgctattagaaagcctgcagaaaaaaaaaaaaaaaaaaaaaggaaagaaaagaaaaagaaagcctggacccagagaaaacaaataagcaaccctgccccaggttcactagagctcggatttccttgtctgaatgcataatgataggaagaaggctgtgttacagaagtagctgttttttgtttgtcatccaggcccactaatctaaacatctctcacccctcaggaattattttaggaccaggaagcagcacgctgtttattgaaagagtcacagaagaggatgaaggtgtctatcactgcaaagccaccaaccagaagggctctgtggaaagttcagcatacctcactgttcaaggtaaacagctgcttaagaaagcaacaagaaattggtcagacatctatttccctgtttgtttaactttccacctcccagtctcctgctgcctgctccagtctgttcctttccctgacctccttctcccctctccctgccactccgggaagggactgtctggttctgtctggcaaagcagaaggtgaagacactggctggccatcctcgagagcccaaaatccgaacacagtgtctgcgggagaagtcgttcccagaagaaaggaaacccagttctgactgtgttattacgccctgccacagagagtggccagagtagtccacacctgtgagagagatgtccaaaatggaagaaaagggaggggggtaggtgaggagggggaactcgcacacttaaaattgttcatttgttttccttttctaattcccaggagttagacatatgctgctattccaaatgcttttataagctggcttttaaaatgaagtgggctgtaatatattatcagaaagaagcaacatgtaatcaacagatgacatttaagaaaaatattccaagtgcttcctctttataggtctcagacagtttgctcagcagcaaaatacaaagaggcctaatcctaccctggctatggccatgtggcttacatttggaaaacagtttcgacctcagtttcaattctctaatgctaagaatcatccaaaacataaaatttacaacatcataaaatatcagattggcacctcttagatgtaaatatctatggcatattgaggttttacgtgaaaagatggtatttgttcagtagcctatttccaaatgctaaccagtcgacttcagaatatgcaagtattttgcggggaggaactaggaagaaggcaacgtacttcagtttttttccccctgaaacttacattgcttaaatattttaactctgagaattcaaacccctttaaaacagaacatcatctttattctttcacaaggagatgattttaaagagccccctgaaagtctgaaactactctaccacaaatttatactttcagaaaaagtgagagggtagcattccccaaatacctttagtaatggttttgtctcccaaataatccttgttctaaaatattatgttcacttttctgctcgctcatacagaaacaatttattagcatctctgtttaacaccttcttccccagatagctgctaatctgtcttttaacaggcaccccagacatatagccctcaggaatggccgtgccgggccagggaacacagagagcaaggagacctcactaatcctcagagcaaacgtcatttcccccatatcctcccaacaaccccatgagaaacacagagcagtgataaacctccagagaggtctgaactgactcacccaactcacacagtctagtcatggcagaccagaggagaaaactgaacttttctcagactcccctcccctcaccccatgactgcattcccctgtccccacccctccaccagggaatatggggcagcaatggctggactcttatggcctgggaggagcctgggtatgaagcagtgacgtttttgcgtgtttgtaggtctccccaaagtcttgacttccttcctttttctgccaggttgatgtgggtttctcagaagccagtgtgcttaaaactgtgcatttacgacatctgtgagtttcttctccccaccttcagaacgaccacccttctgttcgccagcagtctgctctgcaggaggcctgctgttattctttcactgctccaggccagatcagcagcaccgtggggccttccagattggattagagtcagtcgtttggccattagtgagccggacttgccacataacgccaagcgtggcctctgtttgtgatgttagtgcatcctggagtaggctccattccctattccagccaaatccttcttatcctctcaggccagctgaaatgctttctgccctggaatgtactccgggatgaacagctgaggcagatactcattctctgctctctcaatccccgcttctggaatcattagtcagtacttattttattctgccttttattattattttggcgttgatatgcttctcttccctaccgaattataaactttgagacagtactgtctgacatatctttgtatcctgtacacatgcccagcacttagcacgaaatatttatttaggacctttatgtgcaggcgctgtgctggacttgtgacatacttaatcctattaaccttgtaagaatctaaagaagtcaatagtagtatcttcaatctacagatgggaagatggaaactcaagttaaacaacttgcccaaagtcgcacaatgactatgtggtgaggctgagacttgagtccacgtatacctcagaatatttccgcccttcctctgctcttctcattcctgaggtgccttaggaagttgtctgcaaggacttaggataaaattgagcaaaagcactctttcagtgatcctgttatttttattttctccatttctctcatgtttacatgcctctagacttcctatgctgattccttttcccattaatgttatgcttttctgaaaagtcagatgttaagaatactgcattactgataatttctaaacctttctgttagccatatcatttactcttgtgaaaagtggaggttattttcacttgaattgcccatatgggttgccacatatatataatatatggcatatataatggaatatatatttatatattccattattttgttcattattgcccccaactgccatgctttttgaactcttgtgtctgctttttgtagttttttggccttctcctttgctctcttttataaaagtgatggctatatccaaccttttttgcttaaaaaaagtagttagctgaaaatatagattacatgattggcaatcatccagccacacctgaaatattgtgcccatttataaaagaaacaaataagtagcgctatatcctggataggaatagaatagtgccagaaaatgaggatacttagtccaaaaaagagacaacatgggggtaacaagattgttttcttgaaatagtttaggagctttctgacagaagaggcatttaactcattctttgacacaccagaaaagataactagaaccaaggaagggagatggtagtgaaatttccaagaggcaggtttcaagtctatataagaatataactttgcacaggaagaaattttgaatgttaatagtatgtggaccttagaaaggcctgcatgtgtgagtcagatgcagtatcttgaatggaaggagtttggattcactggattaaaatttgatcctaggatgctgttcacaacagctgaatacggtacctgctcattaattttataattgaaatgggactcttcttctagagtcattgttcttaccaccctggtagctatgaaacattccctagatttagactttatttcctgttagatgcatatggaccctcacactgacctatcttgtcaaattgagtttaggaaatgaaaccaagtgaacaagttgtgtctgtggctatgtttaacagatttaaagaggttggtgaattagccaggaaggaaactgtctgctctttttatttcctttgaaaaaggattcttatactcacagataaaacaatgtgttatttttgtatccgtaaaggatgaatgaactgtggagtcaaagtaccttctttaaataatcacaggtcttgtttggtttggacctagtgccagcacgagggcacatgaagctctcaaaggggaaattccatatcaaaaccgacaacagaagtgttagtaactaaaatcatttctgaaattaacatagcgctcagtagccctggaactcaatggggctgttacaatttcatccaaggacttaagctatgctttataattattaatgcaaataaccacaatatatataaaaacattctttttttttttttttttgagacacagtcttggtctgtcagccaggctagagtgcagtggcatgatcttggctcattacaagctctgcctcctgagctcaagcaattcttctgcctcagcctcccgagtagctgggattacaggcgtgtgccaccacgcctggctaatttttgtatttttagtagagacggggtctcaccacgttggccaggctggtctcgaactcctgacctcaggtaatccacccgcctcggcctcccaaagtgctgggattacaggcatgagccaccgcgcccagccaaatctgatactcttatatcagatttaggccttactatatttcagtattatttataagtacataggagaagacaacttgaagaagaataactatcattctaaacatttttcgaagatgattgacagatacaaaaatcccaaaggcacaaaaggactacatgagggtcctgcagcctaaatgctggtcatggcattagaggctgatttgcaaacgattgcacgttgtcacttgtttgagaaaggactcatccagtagaaagtagacactatgttccctaataaattaaatcccagaagtcaataacagaaaaaactgaaaacaatatggccatgggtcttcagtcactgctttctattgcccttggccagctatcagttttcagttctccattttgaccctcctctgatccctgactgacctccctccacgttagctcctctcttcctgaatcctgcccccaaattcactcctatgactatcctggcactgagaaaggatgtgataaactaattcgcatgaatatgttggggattgatgttacacctctcatgggtgttggctatttagaaaggtttcccgaggagagagcagtgctcaaaacagagatgaaccagttgtgcactaatgtcaataggagggctgagggacagggatacacatgcctatacttcaaatctaaccagtgacataaagctggccttgatcaagaagaattttaaaaaatggtgatggaattcagttaggctgatttgaggtgtttgtagagagttcttgaggcaaaataattcaaactcaaaagatattcatcttaattccttccgtagaaactaggctggcataaaactgcattgggtatcatagaagtgggtgttaggcctagggaacttggtgctgggctctgcgagggcctgggaccatgtaattaatatcttgcgcttatagaacatgcagtgcactattttaagcacataacatccgtaatcctactcaagttttgcaataatcctacaggtacaaggaagtacagttagttaaaagggagaatctaggctcaaaaaggttaagtgacttgtccagggttacacagcttggaaatggcagagctgagaattgtagccatgttcaaccatcctgctctgttgctctataggttttatgctctatacctcaactctaaggtagcacagcacggtggttaaaaagacccattctgaagccagatgcctcactcttcatgggctgcataacttttgccaagttccttaccttcctggtgcttccagtctctcattgtaaaatgggcatgctaatgatggtataccaatctttgtaggcttgttgtaaggattaacacatttaaaacagcatctggcatataataaaaattttgtaagtgttagctaacattaccgtttgttaataagatataccaaattccatttcaacaaaagtttctgtattatacttttcctggacttaaccagtgggtcacctaaaaggtgttctaagccacagaattcctgtttgacttaaggatttaacttgtgaaaaaagaaatgtgttccagaactaacgtcacgtaacagcaatttaaatatccttacttaacagtactcttgaaaatgtacttaaaatataatgggaatacagcatttccatacatcactgtccttaggagtggttccaaattggtgtacatagattcctaaaaaacttcatcgacagtaataaaggtctgcaggcctattttaacatttcaataggctctagagaaaccatatagtaagtaaggttacctggattatgctgactgggttttacatagaaggagatggcactggttgagtggcttatgttgctcggggatcttgagagtcaggtcaaagtgcatctgagtaattttcttctcgttcatacctaaatctttattgagacttcctctgagtcaatgctggagactcaaagcgaacaagaaacatgtccttctcttgaggtcctaacaggttaatgggcaataaacccacataagtagttactcaaattataataacaatagaaccagagaataacacctaaaccaaccttaggatcaggcaaatttctcagggaggtagtggaccagttgtttgcagaaattgatgagtacttaggtccaaatctgatttgtttcagaaagaaaaggcaaattgtattaaataatacatgcaatgtgtttcaatgaaaaaaaattactctgcacttgaggtccaaaaagtgataaggaaaaaaaaaagaaaagggttggagtaaggggtgtagatggagaaacagagagacggtgggagagggagggagagagggagagagagagaaaggaaagaaggaaggaaggagggaaggaaggaaagaaggaaggaagaaagggaggagggaaggaaggaaggcaggcaagcaggcttcaaaataatagctaacactaagttaacacaattcacgtgtgaggaaggggctgttatctccactttgtaaggatgaggaaactggggcacagagtacctgccctttcccgatgaaacctgtgttcggtccctaagtcaaggcaggccctgggacaaggtgctctggtcttttgcttggggtgtttccttaactccttgggaaactctgtctggttatattgcatgagctgagttggctggctctgctgcctacccattcatgcagtctgatgccacacagtgccatacatcagggctggtgtgatgccgccagaccatgcagcccaggctgtgtgtacagagagctactattgctatcaggaaagctcaggacactgcgcagctgcagagacgtcaggcaagatacacaccccttcagaactcagaccatccctggtgtggcatctcccctccctattccaaaagggatggtataaagcctgggagagtacttgacgtggaatgctctgtgcaaccaggtcaacagtctgtcatagatacagttaacatacactcttcaaattggctatattcttgtcagtatcccaaataaaaataaccttgtaccgtgtcctgatgctggcctttcacgcacatcatgcgggagccatgtccctgagacccagtgctaactcctagttactgtcaaatcccacccacatttccctggcctctttccactcctgtgtgctgctgggttatctcatgcacttagctcatcagctgtcaccagcaaattgaagctgggtttagtcaggccagtgtgtttgactgctgagaaaacacctaagggttcacttcagtcagtcacccagcataagactgtcctaacagtcgcttttcaaacagagatagagactaagccatcaaatgcaatagagcaatgatactacagcacatactgtaaaattctaatatttttcaataagcagtactgaacattattaatattaaatagatctttccttcccgataaatggtcatcttgaagatttttttaatgggctgattccttaaatgtgtaagtatttgcacacaaacacatttggtccactgaaatgaattttgcttgagtaaggactgtggaattagactttgggggtcagcttcctgtcccatagaatgcagcaggaaagttcccacaatcaagggggcctctcttagtgcattccatgcgggaagcatctgcagaggttttatgcagacagtgcaatgtctcaagatgctatcagcatctccgacagccaaaggccactgtgtcctgagaggatcccaatcccaatcaaattccacaaaatttatttgcagcataagcaagaatgtgtgcgtgtgtgtgtgtgtgcgtgtgcgcatgtgtgtgtgtgtgtgtgtgtgtgtgtgtgtgtgtacagcaaggccgcattaaacctcactgtcactgtggagaaagaaaccaaactcatatgaacttgagcttacaatcttcccattgtgaggatgtgtagtgagagaaaaggttatcacacttagaaatttctttaaggaagttattttcaatcaaccccatgaggttcagggaaacttaagaccagctgacaaagcagcaaataagccaattcattcatttgaccactattttcaggatgtctactatatgccaggcactattctgaaccctggaaatgtagcagtgaagaagaggaccatagccctacgttctgctgcttcactcagaacttataacacactcatcagttcatagttgaataccagactgtgagctccaaccatgccctttctcttctaactgtataccagcacctagaacatatctgcaacagaggtggtggtctatatgttttatgaagtaatacacaggaacagagacgtgaccctaaactctttttttttttttttgagacggagtctcgctctgtagctcaggctggagtgcagtggcgcagtggcaccatctcggctcactgcaacctccgcctcccgcgttcaagcaattcccctgcctcagcctcctgagtagctgggactacaggcgcctgccaccatgcccagctaattttttgtatttttagtagagacggggtttcacggtattagccgggatggtctcgatctcttgacctcatgatccgcctacctcgggctcccaaagtgctgggattacaggcatgagccaccgcgcccggcccctaaactctttaaaaccctcatgaaactctttagaggtaggtaaagcaaaacatatatatacattcattcgcccaagctgatgagtagggtgaataagttatggactcagtcatcaggaagcacacattttggcagagaaatagcaaaagccaaagcatggatgttctgaagggttggtgtatttaagaaactataagaactgtggcgtgactgaagcaagtgggaggacagcaggagatgaagctgaaaagagaggcaaggttgggcataaaggatttaaggatttggacttttatcctgatggtgacagggaacagatgacggaatttagacagaagagtaataggattttaaattggtgatttggcaagatcactctggctgcagaggtggaggacagactggagggagccatggccaatgaggtagtcctggtgagaactgataaggccttattttaggcagtcacagctgggtaggagagctgataatttaatgatccaaggaagtagaatgggcaggactttgtgatgggttggatggagagaaaatatcagtttccactccagactaaaagataactttgtggcggggactatggccaataggaagtgattaatctgcgcttgtaaaggctggaaggatcagagaggaggaagtggcatactcttggaagcttcgtggttaagcatgtgcagtcagattatctgggttaaaatcacagctccaccacttgcaggctgtgtgactttgggcaagaggcttaatctctctgtgtctcaatttccttattcataaaatgggaataatctagcttgtagtatttttgtgagtctttggtgaatgaatacatgttggtccttagaaaagtccctagaatagaaagcactcaataagggccaatgagttattgttatctcaggtttccagcttgtgcatttgctatgatttgggcaggaaaccttggctccaactgcctgcagcctttagatcaaacccatcacacagatgctcagaatcctctatggtctggtcctgtcttgtatcttgtattatactgccctatcttttcccaggtctgggtcttgtgtcttgttttggttttgagatggagtctcactctgtcacccaggatggagtgcagtggtgcgatctcagctcactgcaacctccgcctcctgggttcaagctattctcctgcttcagactaccgaggagctgggtgcccccccaccacacccagctaattttttttttgtatttttagtagagacagggttttaccatgttggccaggctggttttgaactcctgacctcaggtgatctgcccgtctcggcctcccaaagcgctaggattacaggcgtgtgccatcgcacttggccaggtctgggtctttactcatactgtttcctctgcctataatgccctcccctgccttcatctctgcagattaaaattcatgtcaaatgccacctcttcaaaaaagtattattagattactattagatagtagtatatattagattccctcagcagccgaatctttcaaaatctaatttctttgtatttgccttaagtctcttggttaggtttgaatggggtccttgagagtggcaactgtccctcattaatctttctatctcctccggcccctaaccttgcctctagtacaactcaatacatctttgttgcattgaaacagagagcccccaagatgaagtgctcatgtatgaaactggagtattactgcccctgacttcatagtttgcatgcttagaatataataagtgctcagcaaattagatcctcatccacatcattatttctaaaaagaaaatttcacttgtcctttgcccaccttaatataaacatctatctgtctgtctctctctctttctctccctctctcttttgagaccaggtcttgctctgttgcccaagcgggagttcagtggcacaatcatagctcactacagcatggaacgcctgggctcaagtgatcctcctgcctcagcctccagagtagctgggattacaagtgtgtgctaccacattttttttttttttaagagaaggcatcttgctatgttgcccaggctggtctcaaactccggggctccagcaatcttccctccttagcctcccaaactgctaggattacagatgcgagccaccatgcccagccacttctgtctcattgtagttaagttaaaggataaaggcattactttagaattcctgggaaattgctcacaagaatcaatactgttctggcccatggaggcatttctttacaaattccagagttccctctctggaggcatggcttgaatactttaagtcttttccttttggtcttggaggaacagtgctcagcttttgatctctgtgattctgatagagaaggtgactgggaaggattcaggtccagcaattgcctcttctatctcaggccccccaatctggctgatgaagccagaaacagagccctagacaaagggagtgggatgtgggcgctttgggctggcagttccaaagggagcaaacaggcaactgtgacagtcctggatttatttttattcttaaattctactttgaagaattttgtgagtcccaaagtagcccttttatgtcattattttgtcttttttttttttttttagaatttcctctaaaactcattagggagatttaacatattccagatttagcattttaatgggcttttgttcctgccttaattttttcccatttttaatttctcctctgatttttacttagctgtttctggaattacaaagtttgcaaacttgacagcaaaatttctggaaagccttttctatgtgagttcattatgtgagttcatgtatactgccttttctatgtgagttcatgtatactgcctggcttagaaggtaagagatctgtcccagagactgattttgtggcagcagattgggttcgctatgataaaccatttagggaaactgagcctcttttataaaaccacaaagattctgagtttgggaatttctttgttgcaccactattgtgattttttttctctccaggaacctcggacaagtctaatctggagctgatcactctaacatgcacctgtgtggctgcgactctcttctggctcctattaaccctctttatccgaaaaatgaaaagggtaagaacataggtgatgttctatgctcctttttacatatattctaaaaagcccgatctgatgtctagagtaggcaaacaaatgttggaccctctttctttcccttccctctcattcctatctctgacctggtgaacacagaaagaaaataaatcatcaaaatgtctctagccacaagggggggtgttcaaaagaaaagccgtaacaatgaactgatgaatacttctcagggacagaaggtatttttgatacaaaatatgttaatagagtctttaaagtcagtgtgggacctgtgaaacctttatttcctaacgctcactctctgctaagaaataaaaaggagactgggcacggtggtacatgactgtaatcccagcactttgggagaccaaggcaggaggatcgcttgaggccaagagttcaagaccagcctgtccgatatagtaagaccctgactctacaaaaaattttaaaacttaggcaggtatggtggtgcacacctgtagtcccagctactcgggaggctgaggtgggaaaatcactttagcctgggaggtcaagtgagaagtgagtcatatgccactgcacttcagcctgagcgacagagtgagaccctgtctcaaaaaaaaaaaaaaaaaaaaaaaaaaaaaaagtaaaggccccacctttgacttctctcataacatattggaagtaaaaataagtggactctttttctatactttctgagtcacaccacaaaattaagttctttagagtgtgaggtccaggttggcattcaggacatcagatttctatacttaggtctgtaatatgatctgcttctctgaaatccagtgggaaaagagcttacatttattcattcattcattcatgcttcaaatatttactgcatacccactcagtgcagcatgccaggccctgtgcaagaccctctggtgacagtggggcagatgctggagggagcagtcaggggagattggctttaatcagccacacaaatgtcaaactgcaactctgagttagctgaaagagtagctgcctaaaagatgtgtaggaggagtgtcaaggttaagaagagaggaaggagtgttgtaggcagaggcaagagcatttaggaggctgggcaggggagggggaacacagtgagagactgacagaaggccagggctacagcgtggagaacaggaggaacaaggtatgaggtgaggctgccaagaaatgggaagggaaagcggcaaggcctggccaggcagggtctcgtaggccatggtgaggaatttggtccgtattctaaaagcaatgggaagccttggggaagaaagctatgttagactaaggcaggaatggggggagtggggcacctagtgtgacagatatatgtctggaaaaattattttggctactgtgagaagaatggacccgggtggtggggggcaagagtgaatagagaggcacctggtagaagacttcttggtagtccaggtaagaaattatggtggctgccgggcgcggtggctcacgcctgtaatcccagcactttgggaggctgaggcaggtggatcatgagatcaggagatcgagaccatcgtggctaacaggatgaaaccccgtctctactaaaaatacaaaaaattagccgggcgtggtggagggcgcctgtagtcccagctactcgggaggctgaggcaggagaatggcatgaacctgggaggtggagcttgcagtaagccaagatcacaccactgcactccagcctgggctacaaagcgagactctgtctcagaaaaaaaaaaaaagaaagaaaaaaagaaaagaagagaaattttggtggcaggccgcgcgtggtggcccacacctgtaatctgagcactttgggacgcctggcactcagggtggatggatcacctgaggtcagaagttcaagaccagcctagccaacatggtgaaaacccgtctctactaaaaatacaaaaaattagctgggcatggtggcaggcgcctgtaatctcagctactggggagactgaggcaggagaatggtttggacccgggggcggaggttgcagtgagccgagatcaccccattgcactcctgtctgggcaacaagagtgaaactccgtctcaaaaaaaaaaaagaaaagaaagaaattataatggcagccgggcgcagtggctcacgcctgtaatcccaacactttgggaggctgaggtgggtggatcacctgaggtcaggagttcaagaccagcctggccaacatggtgaaaccccgtctctactaaaaatacaaaaataagccgggtgtgatggcacttgcctgtagtttcagctagctactagggaggctgaagcaggagaatcacttgaacccgggaggcagaagttgcagtgagttgagatcatgccactgcattctagcctgggtgacacagtgagactctgtctcaaaaaagaaagaaaaagaaagaaagaaagagagagagagagagagagagaaagaaagaaagaaattatggtacctctggctaaatgattagagtcaaggatatttgggaagtaaaatcagtaggacttgagaagtatcagaaggccttctcaatttctagagattagcccttattaatatgccaggtcttatgggaagctctttatgtagtatgtcaataaattattccaaaaatatgaaaaggtaaatatattattattcccattttatagagagggcaactgaggctcagcaagacaaagttaactgatccaaagtcactatggttggaccttagttttgaacccaggctatttgaccttagatttgatattaacaaccaataagatatactttatagtgctggtatgagagacaaggccagcagccatcctctatggtaaatgtttaacatcaggcttttgccatttggagtgactgattttgagacatgacaactaagtccactgcttgagaaggaaacaaaggtcacacaatagttttgaaaggggagatacaccatatagggaaatacatctaacagaagcaaaacttgccaaatctgcaagggaggtacaaaggctataggagttcaaaggaggagaaggggagaaaaaacttccgagaaagcaaggcttgagacagactttgaaggctgtagctggaaggaaagaagcagaaaaacagcccgccctagtccttcctactccccagagcggggaagtagtctggttacttagcatagaggagcacagtagaaataaaactggaaaggggccgggcacggtggctcatgcctgtaatcccagaactttgggaggccgaggcgggcagatcatttgaagtcaggagtttgagaccagcctggccaacatggtgaaaccctgtctctactaagaatacaaaaattagctgggcatggtggcaggcgcctatgatcctagctactcgggaagctgaagcaggagaatcgcatgaacccgggaggcagaggttgcagtgagctgagatcatatcgctgcactccagcctaggcgacaagagtgagactccatctaaaaaatataaaaaataacaaaaataaaactggaaaggtacattgggactagattgaagaggtgccttctatttctaaaattctgtgaaattttgatgttaataagaaagaatgagagcaagagatcattatctcaaaaacagaatgcctgtaaaatttgaaagggattgggggaggcaaagaggaacaagacatcccaaaatatttccatgtggttcctctaacgacaatgtaaattcctcattgataaagatggcattttatattttatcctcaccctgcataactatagctaacatttattgttataattatagccaacatttatggaggcttactacataccagactctgctcttaatagctttccatggattatttcatttgatattcacaacaaccctatgagataagtaccattattacagataagaaaactaaggttagagggcagtttgtccacagttatgtgtgtgggtgagcagaagttgacctgtgattcaaacccaggtattcagcccccatgcctgggctttgaagcacttagctgtgcagactccatgccaagcacctagtagctgctcagtgttaatgtcaattgaaagaataaatatttgccaactaacattttactatcacagtctcctcaaagccctcacttaaggtttgtttggtgtctcctctcacctgccttattgagacaaaccataaaattccataggtgccacgtgggagactgcctaccaccgcctattcccctgcctctgtcaacactactgccagcctccccacacatcctgcatgagcccaagatgtcccttgcgaggtttcagctatcctatgctctgtgaggattggagattgtttctcagggctcgggtatacaggacattgaaaagtttagtcataaaacctactactacagcagtttctctaatgggcacctagtaccctgttataggaattcatactcttcacagagtgtctggcaggccgggccctcatagtctaacccaatggcaaccacagtttgtgacaaacgtgctccatatcgttttttgcttctcatcctttatggaggccaagcaaacctttctgccttgagctatttgtcacacattttagtgataatttttgtgagaaggagaatgatttcaagtgatggatgaggtgagctgtgacagcccagaacagagtgagtaagggctgaagaatgcgagtgggtgtcaaatggtgtgtatggagaagttgtcttctccattccaactctgatcccgtttagggaaaagcaccaaaaggaagggccccaaaactcatttaaatgaagtttacataacttctggccaagagttatatgggaaaacatgcttcctttccatcctatccaagagtctgcccacagacatgcagtcatcaattctagaaatttgcccattaacaggaaatacacccactgatatgaatctaagacattaaatgtaaatccacttatctatgatctgaaatgaagggtattttctgggcttgatttgcattaccaagataaaaaagcacttcaaggcagatgtctgccttactcacttgacatcctaccaatggacaaatgaagtcagaatgtggcttgtgtataagtcttatgccatatttactccttggcctttgaaataatcttttttttttttttttaagacagagtctcgctctgtcgcccaggctggagtgcagtggtgccatcttggctcactgcaacctccacctcctgggttcaagcagctctcctgcctcagcctcccaagtagctgggactacaggtgtgtaccaccacacctagctaatttttgtatttttagtagagtcagggattcatcatgttggccagcctggtcttgaactcctaacctcaggtgatccacccacctcagccttttaaagtgctgggattacaggccaccacatagacagcctcaacttccatttcttacagaaggtaaaccttattccagtctcactcaggattcagctacaacctttccagatagctgaagcaactaagaggtcaggccttctgaaagtttaaacacttcataagaaatgtgcttttcagtgccccagggatcctgggtttactttgccacttcttgcttttcctatatatgtagaaaagccacagtgcgccccactgttggcccatatgtaatatatattcctgcttatacaagatggccatgggaagttatttttagtcattgtttggaatgactttataaaaatgctttgcattttttagcaagaccatcatataattgtttaagatcaagtacaacacataaggtcactggagaatttgagtgcatgttatccaagataggatggtagagctcacattacagaaatgtagtgtgggaatagtaaggagtcgtttaatagaaattgcacacctaagtgtgatgagtgtatgtgaatgtggagaagtactttctgcacctggccacacagtttcaaccaaatgatcccaaataaaacagtggatgttaacggaatatctaggatttgtaaagttgttttcttctcgatgactttgagatctctttatttctcagtcttcttctgaaataaagactgactacctatcaattataatggacccagatgaagttcctttggatgagcagtgtgagcggctcccttatgatgccagcaagtgggagtttgcccgggagagacttaaactgggtaagatatttgttcaacagattcataaacctatactgagcacatattacatgaaaaacactgtgctttgagagatgcgaaagtaaactagacctgggattctaccctccagctgctcacagactagcaagggagatggacacaaaagtaaataattccaatgcaatgctcagataacagtacaaggtgacacgcagcacctgtttgttcttgcaacagttattaggcaccttctctgagcagcagacactggtctaagccctggagacacaaaggtgcttgcatctcttccctcaaagggctcagtctggagataggtgcaaaagtggtaagtgaagggcggcggagagagaggcattacaagtacacgcacgcttacataatgaaactgttgagggattagaaatatgtgatccagaacataattgagggtggcaaggaacagtgaaatcaaacattcggtgaaagagttggtgctcttcaaggccatggatcaaaaaaaccctctgcacaaatccacaaattacatactttgattttcctgggaatgtccagaccgagtagaaagccctaggggaatcatttaagtttcacttttgaaaagcaaagactgttgttttccaggtagggcagatgctataaacagcaggcaaatgtgctttcccgcagcctaccttccagttcctccagctcagacgtcacaaagcccattaatctccagcctctggtgctacaaaacaattggaacctcaattactcctacccaaaatgtttggattgtggcttctgaaagttttccactcactcctgtgtatgccagagtcattagtagttggaactaagaaaacagattgtggatccagtgttcttggagcttgtccctctcggtgtggagagcctgttgttccaaattcaacagtatcgtccctctccttacatgcaaatgatactggggtgagggatttagggggcagagagaggaaaatggcttttgtttttctcttgggccttgaaatgattctgcttacactgaggaaggactggcctcaggagcatgttctatttggcttggggaggaaacttggaaatcagttaaaagctggagagacaggagaaagccagcaatggctgtggacaggaggaaaaaatcaactacatttagagtagttaagggcaggtggcacactggaagagttccttctgcaagtctaaattatatggcagctagcccaacccctcagtgaccttggcaggaaatatgggataattttcccacaatcacgagccattctcagctcacattgctttccagagttattagtcataatcaaacatgcttcttccagtataggacacatgagctttctgtcccatcgcttcattccttcctagtatcattgtgatccacaccacatcacagattgctaatccttctaccagaattcccctggggctctgtgggtttaaataatcccatttcaggagagtctccttgttgaagatcattcttatcactcttttcctttccagagttgccacatgctagaatttggctgatgtccatttgagtgtctctgatgggtgagagaaagtgtgtcaagtctgctaactttgtctttcaatacagagtgtggctgcaaggccccgaggtacactcctctgattgattaacgtgggagcaaggaggcccaagacttgtttatttcttaagccaaataaatgacaaagtaatttgaagtaatgtctagcaactgaaaataacccagattatgtccagatagagagaaaaggctgttttaactggcagttatactggggttgtaaatgtagagaaatacacaaggttatatctggtttcagctgtatctacttgttggttactatcagcagccctagtgagtgggattggaatttatagtacctgatagatggatgcagttggaggttgggtcaaaggtgttgctaccattaaaattcctgaaatccaagaacaaaaagaatcttaaaaaaaaaaaaaagattcctcactaacccatgggagggaattcagcttctataaatttatcacagaagttaggagataattcagctcctatatatttattatagaagttagaataggctgggtgtggtggctcacgcttgtaatctcagtgctttgggaggctgaggtgggtgggtcacctgaggtcaggagttcgagaccagcctggccaacatggcgaaaccctgtctctactaaaaatacaaaaatgagccagctgtagtggcgcgtgcctgtagtcccagctactcaggaggctgagccaggagaatcatttgaacccaggaggtggaggttgccgtgagccaagatcacgccacggcactccggcctgggcaacagagtgagactccgtctccaaaaaaaaaaaaaaaaaaaaaagttagaataatgttcaacactgcatctttctattgaaaaataatcaaaagtcagaattacctaatacagcaaacaatacagggagtcaggagtttggcaagtgaatggtgcctgggctggtgctgcctcttgtaagaccagccctgaatgccagagacggcccaacccatgctgccatgcactctccccagcgtgtccagggcccctggccagtccaggacattcttggaggagattccaatatccttgcattgtatggcaatgacctagcacacttccgagctagttagtggcattccaggaaacactgaggagaattttaagggaaaagaaagatcaggtgaggtcaagtctgatgcaactgggctcccctgaaactggaaccatgggtctgcagaaggattccaacacatcagatgattaaggagcccataacagcttcatgctgttttatgaggcagcagtcagcttccaagagaataaatgaaaaggctgagggaagccaaatgagagccagtttattctcaatgataagaagcaaagtcccaaacacttgttaaaacaaagtgtgttgtgacggctaagacgggatgtgggggctgaaactatggaaagtgcaaaggatgccacctgccccaaacatgcaagggtcttaggtgtgtaaggagaaaagatctggatatttctcaggctcaggacacttttctttttagatggtggaaggcattgtggaagaaaaacattgatactttatcccaaataaagcaaggaataaacctccaaccaaaatgcaccagtttttactagtatagagaaggcatctgccagcgctgttcccacaccggattttcagatgtagcactttcaggatccactggaggctcttttatttcaaatcgagggtccccatcctggtctatttcttcaacaattttatgcgaagaaggaagcagaggctgtagctctgcccgtgttgcatgctctgggaggaatgtcatttagtaatcactacgggagcatgtttcacaaaaagagaaacgtgtcgtctccccagtgttctctctgaatgcagagcatgtccctgcagacagccacacagaggccctaatgatgacactggtataagtgaaattttcatacatcctaactggacacctggggtggtgggtagtagaagacattaagcagagcaaggtaaagacatttttgtcactgagtagttgggcataaaagtagaaaggttctaatatgatgaggaagaagcaaagcttcattacaaactacaagaaaattttttaaaaatgccctttggggaaagggagtggagtaatgaggaaggaagggaggaaagaaggttcattaactgaaggcacattatcagacgggtctaagaaagagcacttggttgggaaaggaggggttgtgttaaattaacactctaactgccaggatttataatagttttaaccaaccagtggtattctgtcatttccccttcccccaagaaaagccaaaaaaagactgacttacttcacttactcttctttgggtatatcatgctggaggtgcaccatttctctgggttctattgagctgtttcctgatgtgcaaaaggaggttccctgatataaaaggcagcttaggtactccagggagtgccctccctaaagggcatcaatctcagggtctccatcccatgggcccctctagttacctatgactaggagacttgctttgggcaacccacacattcctgaacaccactctccattctgcagcaatattcagtaataacagatagcaccaggcaccaagttaggttctgggaagattcagacatggtccttgccccccagagtaaaggggggcaaggactccctgggtcattctaggatagggaaagaaacatattaacagtcattatagcatagcattatggggaccatgaaaggaaccttgcttagttattgcatttagcaactacctctctggggttgaaacaaatcactaccagtggttgaccaggctcctgtgctgaaccacgaggatttgtaatcttcacctaagacacattagaaagactggaaatattttgcctggtagggaagtcggataaatgacttagtgattattttaaagttatgagcattattataatccacagtagtaaccaccattttctatttctccctttttgctgaaaacagatgagagaaaaatgactgtaaatggaaaaagaaaaagagcttaggttccacacagggaagtcttcttggtcataatgttattaaacaatggaagaaactacacgggacttggtcccatctctcctacgggagaacgctgtggaaaggaaactggacatctaccttcactgaatgccttctagggacttactctatctttgaaggatgtggggcctcaggaacagagttaagagttgaaaggaagagactccagaaataagtcccttactttgtctcttttagggttagttcactggagattccatgcctcacatgcacacataggaaaaggcatttccttcctgaaaaagacttaaactcaccctattgcctcggcaaacaaaccagtgtcttctcttcattacaggcaaatcacttggaagaggggcttttggaaaagtggttcaagcatcagcatttggcattaagaaatcacctacgtgccggactgtggctgtgaaaatgctgaaaggtatgtatgctgtagtttggctttcaactgacccatcaccattttgcatttcctaaatgttggtacaagttagatatagcctgggaacagacacaagcttttctgctctggacacataattttcttctactgctagaggcctctttgctcacgagttttagattaggccagcacgagctcagaagaaaccttgtaaatggaacaatccagcactgtccataggaaaatgatctctgtcacctcaaaggtctttctcatctcacatcacagactgtagacaacaagggacttaagcccattgtaactgcaggttcagattttggcatgatctactgtgatgttgtaatggaaacttagcagcacattctaaatcccaatggctttgcttgggcttgacctgactataaagtaaaactataaagctagaacaattgagttgatcagaactctaaactattttatactaactacctcagccataaaacatttcctctttagcagtttaaaaacctgaattatctttctagtgttgaaagatactactactctgtgaagcactgggaggtagaaccaaatcacacagtgacttatgcccaacaccaaagacagattgaaaatgaaaatcagtgaaagctgtgtaaaccacatgtctcaaagactcacaggtcctttacagtgtagaaaatacttcatttcctcatctgtaatggaattttatgatgcttcaactcaacagaactgaaaactcaaaaagcagcttttaactttccaaagtctccaggatactgctgggaaattttgaagcccagcaagctgtgagtccaactacacgggtacctagtacaggctccaggagaaagggttgtttgcttagggagacgtcaaagttcttaatcttctagcaataactccattatttcaaaagccccatgtaaatatattttcaacttcaaaaggtttactcctcaagaaaaaactaataaaactctgcaaagaacctgccaattctgctctgaaagtagtctgggaaggagtttggtatccacaagtcagaacttttgtttggggtagacttcccagacgaaggcaggtatttctgtcaaaatagaggcatgctagcaccctccctgcaagaaccccagattctgaagagaagaggcatcaacatgtcttctatgtaagaaagcaccagactagatactttcacttattaggctgaaccacacaaaacagccatttttcttatttcctctcaacagctttgtgaggtagacattattatcctcagtttgcagatgaggaaacatggccaagaaaggttaaatagcctctgcaaggccacacagctgctcagcgtaagtaagggtttgtgtgcgaaagtcttccagctttgaatgcagtgctctttcctccataccagtgtgccacaaaagaggggctgcagagacctggcctcctggaattggcacactgctccaaaaccctgaagatgatcctggcctagtttatggaggcaatccagtatccaacctagagataggtggaaactaaatctggaagcaactgtttcctcagctagtcccgtttctctgcttgctgccacacattgtcctctaggagaggcagctctgatatccacactagtctgttgtgggtccaagataatacctgtggccctgcctataaatacagcaagctgaaccagcacctggtttttttcctccaaagaggaaagggttatagggagatgaatgagtttgaaagaagattctgacttgagatttttttttcttctaagagacagggttttactctgtcgcccaggctggagtgcagtagcatgatcatagttcactgcagcctctgcctctcaggctcaagcagtccttccacctcagcctctcaaatagctgggactagaggctcacaccatcacacctagctaattcaaaaaatttttttttgtagagacagtatcgccatcttgcccaggctggtctcaaactcctgggctcaagcaatcctcctgtctcagcctcccaaagtgctgggattacaggcgtgagccactgcacccagctgagatttttttaaaaggctcagagaatctcttctatgtaatacagattgcatgtgtagtgtcttcataaatgcctattttttttttttagccatcagcattgattgtaaaagactgccaaatcatccactctataaaattcctttaaaaaatttcattcagctttcttgcttaaattaattggccatctgattctgggagatagaaaaaaggcatggcccggcgtgatggctcatgcctgtaatccagcactttgggaggccgaggccggcagatcatgaggtcaggcgttcgagaccggcctggccaatatggcaaaatcccatctctaataaaaaatacaaaaattagccgggcgtggtggtgggcacctgtagtcccagctacttgagaggctgaggcaggagaatcgcttgaacccaggagttggaggttgcagtaagctaagatcacgccactgcactccagcctgggtgacagagcgagactccgtctcaaaacaaaagcataaagtgaaacaaaggccataagtcaaaagctctttcaaagtgtccttgagcaaaaatattaatctttttgggccttacacccatgcctgaaatgagaagagtaattgtgtttatttattccaaaatatttgttgagcatctactgtgagccagccctaaccccatgcacaggatttggagtttatctagttattattaaaaatgatttgtgcttatgaaataccatgttggtatctaccacaatgttaaatgcacatacctctaacccacttccaggacactgtcctacagaaacacttgcatgtgtgcacagagattacacacagactatcacagtattatttgtaatagcaaaaagactatagacactctaaatgtcagggacaccattaatcaattaaaaagaatgggctcacactggccaccattaacgtggttaacctgctgggtgtggtggctcacgcctgtaatcccagcagtttgggaggccaaggcaggtggatcacctcaagtcaggagcatggtgaaaccctgtctctactaaaaatacaaaaattagccaagcattgtggcacacacctgtaatcccagctactcgggaggctgaggcatgagaatcgcttgaacccaggaggtggaggttgcagggagccgagatcgcaccaatgcacgccagcctgggcgacagagggagactctgtctcaaaaaaaataaaaataaaaaataaaaagaaataaaaagaagagaaaaagtctctgatttattaaaaggggggaaatagattttttaaatagactatatatagtcatatatatcatatatatatgatatatatatatatatataggacctctgattgaatatttataaatgcatagaaaaaggtctgaacaccaaactattaaccatggctgcttctaagaaggcaagtgggtcggagtggcttttgctttttatctagaacattttattccaactcatattgttgaaatattttacagaaagattatttgatttttatatttctaaaaataatttaaaatttttaaatgccttgcatattaactaataagaacaaacagaacaaactcaatttaggctttagactctgctaattcttggactgataatgcttatctctgagactgaagttgaagtcagatgctatggatcctcacaacccaagataaccctgtgaactccagagaggacagggttacagggagaaaataacacattgcaaagatgtttacaacagtagccattctgccctggcaggccccttgtgctccttctctgtgactccccaaagggagaaggtgagaagaggggacgtggaggtgtactccctgcctggtgggttcttgctgcacctggttctgacagaagggaagcctttggaaggcactttcacgaggtgcccagctctgagtcagcgcattgctgaagagaactaggtccaccaagaggaaatgtccagtgactaaccccactactgtgctgggccttactgtaatcaaaaggatgttggctcaggagggtgggagtaatgaaaacagtctggagacttggcctttctgcagaatgtggggaagttagtgaagcaaccggctgagcattgacaaacaaggagggcaagaatgccgcctccggcggaaggagccccattgtcctgtcgccctgactcttccttgcttctcacacagagggggccacggccagcgagtacaaagctctgatgactgagctaaaaatcttgacccacattggccaccatctgaacgtggttaacctgctgggagcctgcaccaagcaaggaggtaatggagaaggggagggccggctccgtctccccctgcacaggctgggagaacagttctctgccttacagctccttctcccccgcactgtgcttcctcgcctccaggaaaacggcctccctaatagctctagaagaaacagcttgtgcatctacagaagggtgctcccataaatcccttccctgtgccgttaatttaaagattctgaagaggactccctttttgatctccttccacaggctctaggctaagcagagggcacttttctctcaggatgggtctgaaggagtgtggccagagccaaggtaaaaggtagaaggttgcatattccttgaggcttcacctaaaggaatgaatgaatcactactggtagggtcccaggaggaggtgatgtgggggcccttccctccagatccaccatgcagatagaccttacccaagggggtagggacagagctgtgctttatgattaagagctccagcatgttgtcgcagacctttctttccgtatggcagggttagggcagagtagatgtgtgatcattgtttgagccagcaaggtgcaaagagctgtgcaagccaatgttttccccagctctcaacagaggtagcagagatgaagggtagctggggaagacaatctgctaggggcggaggtggttagagaggagctaaaggctggggaggccagaaacagtcggagggacctcgacacggccccgcctgcttctccatcatccccggataacgttttatgaagttctctgtcgtggcaacctcattctgtttgcctcaactttgcatctgtaaaactgatcaggtataatgagacagcttaccctcatgtgcggccgtcagctccgtgcagctgggcgccagcatggaagcccctctgaggacggtggctggaccccatgcgggagccgaactctgcggcatctgccgccgtagaggggacataaaaaactctggaagcaacttcccgttctggaacctagggggaagatgagatgctgttaggatttctagcgtgttcctcgtactaagagaaaaccactccaccaggaccagcccaacttctgcaaggcacaaaaaagaactagtggcttctgggctcccggcatgccctgggcagcggctggtgaagcagctccggggtcactcccctttgacccagaagtggtccttgctttgtgggctgcatgcccagcccaggcatgcagtggaaacgcagggcaggagagaggaggccttcagagtgcagctggacttccttcccaaccctcttgcttccttcagaccggggtcgggttggcaaaccaaggtcagcctgtgagcttaaaatggtttgacctttttaaagttgggggaaaaaataaaaaataaaaataatatttcatgatatgaaattgtatgaaattccaatctctgtgttcatagttttcttggagcacagtcatacttgtttggttgtttccaggctacaaaggcagaattgagtagtagctccttgatctgcaaagcctaaaatgcttactagctggacctttacaagaagagtttgccgattcctactgtagatcctctggcaagccccaaggcaaatcgcgcagacactgctggcgagagacggccaggtagccgtctctgtcgtggtagggagggaggagctgcttaatagttccaggactggtgtgacagtaaccagaagccgctctactcgcaagggtctggttaagaggcagggaggctggcttttgcctctcccctcctcaaacgtatttctgtccttcttccaatcttttctctctaatgcttctgcactgcccctcacctccttttttttttttttttttttgtatttcaattgtattctttaaaccccttcttaggttaaactgaaaaagtcaccgtattcatgggcctctcatccctaaatcgcatcccttcgccccactaatacaaaggctggttggtttgaggtttctcaggcaggctgaaggctggcaaatggctgactggcttggtgtggctgagcatgagcatgtgctgttttggctgcagggcctctgatggtgattgttgaatactgcaaatatggaaatctctccaactacctcaagagcaaacgtgacttattttttctcaacaaggtaaggatttcaaaagttggaggtttttaaagatagcaatgagttttcatttagtctgtaacaacataaagcaagagaaacctgtattgtgttgttaatgattaaacttaaaactcaatctctgcttcttctccttttttcatgttttttcccctgataatctgttacactctagtgtggatagcacagagaatcatttgatccctgtgtgcgtatgcagccataattggagagtaaatctactagccacttatctaaatatctaacaataactttctctctttctccccctatatatgtgtgcatgtgtacatacacgcaaacatacatacacaagtcacttatttctttaaggaagataatagttaatataattgtctccatttattaggttagattttgactaaggctaaatcaactgagtgacttgacaatcagcagtagaccaatgatgtggccagggccaaaaatcattatctttcttttccactgccctttcccctacttcctgacaccctcactacccatgtcatccctacatatactctgaaccagccttattaaataaaagctgtgtagtaaaaggaacatgtggacccaagacctaagggcaaacaaggtttaaaagagattattgggccaggcacggtggcttacgcctgtaatcccagaactttgggggctgaggcaggtggatcttgtgaggtcaggagttcgaaaccagcctggccagcatggtgaaaacccgtctctactaaaaatacaaaaattagccaggcgtggtggcccgcgcctgtaatcccagctactagggaggctgaggcaggagaatcgcttgagcctgggaggctgaggttgcagtgagccgagatcaagccactacactccagcctgggcaacagagtgagactccgtctcaaaaaaaaaaaaaaaaaaaaaaagagagagagagattattgaatggaggagaaataatttactaaaactttgccagtgtgacatatggcaccaatactgtgtccttctctgagctgaagaagtccaggggacagtgattcaacattattaaccagtaatcagcaacactggtgatgaacccatgtagtgtggtggttaaacattgagactctggaatcagacttcctggattcaaatcctgtctctacttctcatgaaatctgggaatgcaaattactcaacctgtctgtttcagttccctcgtttattaaatgaagcttataatagaatccagctgatgggattgttgagagaataaaaatctctcagtcaaacattcaataaatgttaatcatcactgtcaccaccactgtcatcatcatcatcaacatcattgacctactaagatagaaaaattgggtgagtccaacttcgtaccactgatctacatggtggataaaatgtctgaaatccaagaatgatgcccatctttataatgtgggcaagaatcttcacacacaaataagaaccactggacagctggccaattttctcatccctcaaactttgatctaattaaagacagagatgttctaccggaccggcaatatatgcaagaacatcattttccccaggtttaagtcaggtcctctaataataagaaccttttttttttttttttttttttgagacagagtttctctctctgtcagtcaggctggagtgcagtggtgtgatctcagctcactgcaacctccgtttcctgggttcaagtgatcctcctgcctctaccctcccaagtagctgggattacaggagcccgccacaacgcccagctaatttttgaatattttggtagagacggagtttcaccatgttggccaggctggtcaaactcctgacctcaggtgatccgcctgcctcggcctcacaaagtgctgggattacaggtgtgagccaccgtgcccggcctaataattagaatcttgaaactgaaagggatctttgtgatcagttggttcacactcgcaggctgcagatgcgttcagagaagtcaagtgattcgcttaaggacacacacctaccatgaggtgaagtcagaaggtgaaagaactcagctctcttgactcctcctccactgccttttctgtgcaccacactaaatgaggtgaaaaaagcataagaaaaagtggaaagtggtgccttgggctgagggcagtacaaattccccttagtactgaaattttggactggcttcaggaagagctaagccagcagaataccctagggacctgggcaggatggaacgtttgggtttgtgcgtcctttgttttgaagagtttgcttccttctctggctatatttaatgatttgcctccctgtgcaacttggtggagcttagtgtttttgtggaaaatccatggctgtctttcatatttggaagataaaggtaaaggaaaggcaaaaccaaaaggctaaattgaaaatggaatacttcattttccaaataaattaactgggatccttaaatatggtttgtaataaattcactatattctgccagagtcccaagagttcagtaaattacctttatttaacaaaagtggtactgataagcaaagctgaatatacaattgattgggagtcaggaagggagtgagagagcctgagttttggtccttggagacatgcctaggctgtgacttttgggtgccgtggggaagaaggctgtccagggagagttttcacatgcagagccctgagtgagcctgtggagcatttttctccccatgctattgccagcgctttctctgatgccttctgtcccacaaaggatcttgtgaaaaataaaattccagtccccaactgaacagaatccaatataactgcattgtggaaacacaataacaaatagtgaaagtctttacctgccctcaggtgggttacctgcaatggcagtgggtattcactctgaggcctgcctccctctgcaaccccggaaggtctcttttcaggggctgggaaccttggtgcccttttggcttttagactaggttagggctgtccctcctgaagctttctcccagtgctctgcttgctcccactgtgccctctagtggagggatcactcttgctttgtgacatttctagaaaagcccaggaaggatggggtacgcgggttaatcctagaactgccacaccatgcaaatggatcaagggacaccactgaactccagtccctctctgcttctgcctcagtattgctgtctagcagaatctaggctacaaacatggtcttgttataaagccactgaaagtgctaggttttagagtgtcatagttactagatgaattacaaaaggcaataaaaatcttttctggtttcccatgaacacccagaactgacaactcctttcctatgaatcataaaataatagtataatagagcttttcagaagaggataattaaactcagaaaagtaaggtgacttgcccaagatcgcatgattaatggaagagccaaatgaaccagggcttggatgtgcagtccagggtgaaaggccattgctacccttgttaggatcaaactgtatctttgtttaaatggaagagaaaaaaagcatgtccatgttccctccttccccaaagaaacctgagaaattggtaactatagccttctcttataactcctcctagggattacagagtgaagcaccaagcacactgaggatcctttcctctcagtgatgtcatccttcacaagatggcgtgtggcatggaaaagtggttaagggcacagatgtgggcatcgaccaatcctgggttcaagctttgcttttttttttttttttgagatggagttttgctctcgttggccaggctagagtgcaatggcgtgatctcggctcactgcaacctccacctcctgggttcaagcaattctcctgcctcagcctcctgagtagctgggattacaggcatgcaccaccatgcccggctaattttgtattttcagtagagacggggtttctccatattggtcaggctgatctcaaactcccgacctcacgtgattcacctggctcggcctcccaaagtgctgggattacaggcgtgagccactgtgcccggccagctttgctatttattagctgcatgtgaatttgattactttacttctctgaacctgtttctccatgtataaataagaactacttcgtaaaattgttggaaacactaaacaagaaatgtacctaaagcttttaatataccagctcacacagagtaagcattcagtaaatacccaccactcttaattttttttttttatctgatctaagatgctgtctagaagcccaggcaagagcacaatagactctgcaactccagaggtagtcaggctcctggacaccgtagggcccctgtgctagttcacgatccattttgagaagtgaaacgctctcatttctcatcaggcgattgccagttgagggactggtttcccactgctgtgctggagctccttttcacctgggtccttttcggtctcttcaaaggatgcagcactacacatggagcctaagaaagaaaaaatggagccaggcctggaacaaggcaagaaaccaagactagatagcgtcaccagcagcgaaagctttgcgagctccggctttcaggaagataaaagtctgagtgatgttgaggaagaggagggtaggtattaattccttcctgtcctacgcgctgagatatttttacaacatactatgcatctctgaaatttttttcttatttatcactctaataaacatccgtgggagactcgaatggtaatgtcctgaggagataagatttgaattaagataatttacagagttactaattttgacagggaactgtaccgttttctcccctcagggattttcatcttaatggatcatccccctgcccccatgcttggataaagtgggctggaggcctggaaaaatctctggtgttcatgttgaaactcaaatactcttaaaaatgaactctgatctacttgttggtttgttttatgttttgctaacattgttccaataaactgggatttggtgggataacaagagccattacaaacagttacggttctaatgctttccagattctgacggtttctacaaggagcccatcactatggaagatctgatttcttacagttttcaagtggccagaggcatggagttcctgtcttccagaaaggtcagtcttgctgtttactgtttttcttctctgccagggctggacacacacctttgctataaattcatttttcctagtatttgctgatacctatgttcttaaatgtagaacaaacaccactgcaagtgccttaatttgccttgatatgaggagttttgagaatgaggagtcatggataccagtggatagaacttaattctggggaaaactcacaggtttcagactagacaaacctggcatcggctctccacagtatcctctggcatattttcaaatctggcccaaatctcagaagacatgacttcataggagagctactattaatatagccatatagggccctcccacaaaactgcagctggagaaagatctcatcttggcagctcaggataaaagactgtggggaaagtttgcccactggtaaatcttagataaccagcttcgctgatcaaatagtagcccagtggattcagaccatttcttgactttgagggcttggggacctgtatttgtagagaggctcttcatgtttatggtaactctgtgtgcaccgagaggtgctcccttcacagcatgtgaaatggattcccaaattaagataatgacactgacaggtgtaggaaattagttggttaggttaaggaaatgcattgattatgcaactgttttattatagtgcattcatcgggacctggcagcgagaaacattcttttatctgagaacaacgtggtgaagatttgtgattttggccttgcccgggatatttataagaaccccgattatgtgagaaaaggagatgtaagtcagtttgatgtttatttgactcatgtgtgtcctatcacttttaaaccacagacttggtaaatatttacacttcctcagctgtagtccctgaaaaccatcattggctttctgtgaagacaaacagtccagatgagcggcatcccagagagcccttgtgtaaggctcagaaaggccactgtctcctgcttctgctcttccctaatgcctggcctcccacctgtcctttgggcagcgctgcgtgagacttgctaacctgagaagtgtttggtggggcctgggtgagaccttagcattaccttcctttgaatcctgagggaattccttgtaccactgaaaagaacagcctggactctttccctcaaataaacccagatgattgattcagcaggtgtatctgtctcaggaaagggcggggaagaccgtcagcagtagctgactatggaggagactgtttacctcccatggccttccatgcctagcatctccccgctggctcgtactggcttctcttccctgcttgtttttagacatagtgttatttttcacttttgtggatgacctcccatgtcctcccttctccttaaccctcagcctatataccctgagggttaagcttatgtctgggcgccaatgagttacagtagtggttcccagcttaattgaacatacatatcacctagaaggcttgttacgctacagtgtgctggcctaacaagccttccaccccccagagtttctgagtcagtaactcttgggtggagcctgagaatttgcatttctaaccagtttctagaccaggggtgtccaatcttttggctttcctgggccacattggaagaagaagaattatcttgggccacacataaaatacactaacactaacaatagctgatgagctaaaaaaaaaaaaaaatgcaaacaaatctcatcatgttttaagaaagtttacgaatttgtgtcgggctgcattcaaagctgtcctgggccacatgtggcccgcgggccaggaattggacatgtttgttctagaaggtgctgacacagcatgtcccaggaccatacttcgagagccactgcaccagaatctgttgtatagaaggaaaacatatgacttcacattgatcctttgtaaaaataaaaaaataaaaataaaggaaaacagactttccttggggccctggtctggagagatggcaccaaccttcatgttagtcctcccctcctttctgttcgtctgtatctgagtcagcctccctgcccctcccacttcctttctccttgtctctcctttatcccatacctcccatcaatccccatcatctaaagtggtgaggcctaactcactgggattcctgctatctgaaagagaggaagatttgtctacatgtttgaaaactaactgtatattctctttcaacactgacttctttccttcttctcttctttctgatgcttttgcacactctccctattcagtgactttggaaatcttgtctttttgcataggaatgctttcaaaatcctcctttggaaaaatttttggaaaccaccaccagttttcaggatatcttcaaattcagatcactcttttccttttccaagccctgagtgtgtccctgtggagtgcaggctttctttgtgggggaggatttctcacagagctatgcagataaggacatgctgaacacatcagaggggcttactgaacatatactgccttcatgggactcagtatagcactctagctccctcttttagcgtaacactgcatactatggtgttctctatgttaggaaaccagagctgctctcggaaatgatttataggccgtatgttatctgggaggtgaccccatggacactcgggttgaatgtgctttgttttcatgcccttctgctcaaggcccccttgccctcttctagactcgacttcctctgaaatggatggctcctgaatctatctttgacaaaatctacagcaccaagagcgacgtgtggtcttacggagtattgctgtgggaaatcttctccttaggtaaatttgggagaaggaagaaatcaaacagcccagaaataaatgtctgcatcttctgctgaatgtcctttggttagacagcctttagattagaacctactgtaacaaaaaactcttaaagtgtaatgggcccatgtagactctcagatgagtaatggcgtacgcatgtctgccctctactgtaaaagggctttatatgatcatgaacaaggtcagaacaaggtcatgtaaaagggctttatacgatcatgaacaagggtataaagtctgaagcaaagtactttttctgtactttgcccaattctgtccttttccaattcctcaacacccacacctctaatgcccttaccgcttccctccccgcgtctcccaccacctcagaatttcttcctaggaaaggccataacaagctcagctgccccagcgaggaaggtgttgttagaaacaggagacctttccagtgcctctgatatgaacacatgatatggctctggacactggtttatacaggataagcaataaacaacactggttgtatttattctgcttgcaataacatccactatgggtggctggaagtcctgttcaaagcacacagatgcgtgcagagcccacatctgcttgcagacacacagtgatgatctgaggcctctaaaactcaagttctcgccaagagtcttttgggctttgccaaaaatttgcctttcacagcaaataaaagtcacccagtaacatccctggtttcctgtaatgtgtgaaaatcattcccctgctttcgatgacaggcacctgttgcttccagtctttgaaagcagcttggcggctgcagtggtcctgcgatgacacggtgccagcactgcacgcctcccagctgcttcctaccagcagtaatcactagaaaatgcacacaaacaaatgctgaggtagatgaggctgcagggctagagcaagagtgcattagaaggccttgccacccccagccctggcaagaatccccccaaaaggaaaggttgcaggggaatcctgggcagtaaagctggcagaaggcaaagcctaggcctctctggcgcccttaggtctgcagactcctggccacgggcagcccccaccccattccactccattcagcccagccctggagcgcaaagccccccttccctcaggcctgtcacaactcctagagccctggtactataggaaggttgcaagaaagtgaattaaagtcattcccactcaagtgtgaatgattcctatgtagcctatcccaagtctattggctttttaaaaagaagcccaagccaagtgtggtgatggtgagcacctggagtcccagctgctcgggaggctgaggtgggaggattgcttgagcccaggagttcgaggctgcagtgagctaagatcatgccaccacactccagcctggtgacagagggagacccgtctcttcaaaaaaaacaaaagctcactaacccaaaggatgagtctctaatgatgggacttctttagttacttgtggggagaaggcaaggacccttcagacgacaccccttcctctgaccacacaggcagaagtagccataggaatagcctgtgagcaccaggtgccccgcaccatgtgaccacccaaccaagcgggtgtccttagcaaggatttgctgagcttctctgtgtgttgtacggtatgttgagatctgttgtaatccctgggaatttattactaaaacgtagctttaaagggaggaaagaaacactgaattgtcccctcttggtcttttgtacccttaagccataacaggccctgtgttttccacattgtctcccgcaggtgggtctccatacccaggagtacaaatggatgaggacttttgcagtcgcctgagggaaggcatgaggatgagagctcctgagtactctactcctgaaatgtgagcccttggtgccctctgctccccatctgacagctcgcttttcaccagggcattcctgagaggggatgttttatggattcttagagtcccagtcttggaagatgccaaggttcttctttcctttagagatgctcccctcagcccatcaggcccagatatgctgggagtgttttcttgcagtggggcacgtggcccttgacccatccctacctatttcctgtcctgaccactgacatgacttttcaagggctctagctgggaactgaagttagaaattcagtttctaggtatgaatccaggcaaaacaaacagaccacccaggaactgaatgcaagaccttggcctcactcacggagtgggagccaaacaggcctagcagccccagggatggagggctagaccttggtcttgtgaccagtcctgtgtctgcacagaacacccgtgagggggttgatgtggtctgcagaacaggtcttggagaggaaaaggggaacttcctgatgtcatgattatgcttcacagaaggctttgtgggcaatacaacttctttagaatcctttgggaggaataggggccgggcgcagtggctcacatgtgtaatcccagcactttgggaggcagaggcgggcggatcacttgaggtcaggagttcgagactagcctggccgacatggtgaaaccccgtctctactaaaaatacaaaagttagccgggcctggtggcagctacttgggaggctgaggcatgagaatcacttgagcctatgaagcggagattgcagtgagccaagatcacgccactgcactccaacctgggtgacagagtgagattatgtctcaaaaaaaaaaaaaaaaaagaaccttttaggaataggcccagcagctgtctgaagctgcctggtcagatggcttttcgggtgtccatgtgaggctttctccactgtgcaaattgcacttgcttgcctgtcttggacactttttttcctggggctttgtggatgttttgcactttgaggcctgagcaggaatgtgatgacacttgcacttttgtggagctgctgacaaggacttgggcctccctgaggcggcaccacctttcctgaactggcaggggccctcccattccacccacacaatggggtcctgtcagaagccctggctggcctttcagaaggaatcagagggaatgcaggaagtgtgggcttggccaaagggcaaagtcactgtctctttccttcatcatctcggggtaagggtaggtcagacccaggatggggaactggacgaggtggacaggagactcaggcccaacagcagggctggggagctctgcctgagcgtagggaagcgggaggggacctgttcttgtcactggtgcgtggtgtcctcatcagaaaagtacagggagctgaggcaaggcctgtttctgagagctggggatagagctagatgattaactttatgattttctaagtgttttcccacacatagtctcatttgaagttcccagagaccttgaggggtggtcagggcagctattgtaatctgaatttagcaagtaatgaaactgagatgccgagaactgaagcaatgtgccgtctgtcagctgagaagcaaaggagacatttagaacccaagcctctggactgatgtccctagaccacggctgatgaattaggaacagaccccacgttcctcagtagaaatgcttctctgatatggccactcatgctttgaattaaatatgtccttccaatcttcatatagtctgaaaatctcgagaaagttctcaattacactaatagttgttattattaaataacaatatttttacatcaaaataaatgcaaaacagtatgaaattaagttttatttttacttccatataaattctaaatagtatgaaattagtttagttgggtttttttgtttgtttttttgagatagtgtctcgctctgttgtccaggctagagtgcagtggcgtgatctcagctcactgcaacctccacctcctgagttcaagtcattctttttcctcagcctactgagttgctgggactacaggcatgtgccaccacgcctggctaatttttatatttttttgtagagatggggtttctccatgttggccaggctggtctcgaactcctgagctcaagtgatccactggccttggcctcccaaagtgttgggattacaggcgtgagcctccatgcctggcctgaaattagtttttattataacagtattgaatagtactgattaaatagttatttggtgcttataagtgccactattttaagcattaatttatttaatgctcataacagtcctataaagtaggactaccatgatccccatttcacagatgagaaaacaggcaccgcacatgtaagtgatttgctcaagcctgcgttggtaataagcgaattcagcttgagtccagagtccacagcaccatcctacactgctgcagagtgtgtttcccattcatacccaggctgtggtcgcaaataactcagaggtacaaagtcacatcagctttggaccaaaaactgctttggactttctcaaaccttcaagtctttacataaacctcgctcaggtagctcccgtgcctcaggtgacctagagagagtggtatggttccttaattctgaggagggagagattttagaaattttaaaaagtaagaagctctgtgaaatatttcctcagaaggccagacttcaaaccttcagccattttctccagcatgtgaaagctgatggagtaatttccttcttgtttgttctaacagtaggaagggctgggtgaggaccaagtgcagcttctcagaactgggattctgtgatctgaacttggcctaaagcggtgtgtatttgggaacttgggtgatagcttggaaagaaaactttctgggggcccctcatccccagcttggatgcaagctaatgtctcataactttactaaacccatttacttagtggtacaaaatcttgtaacattgagttgttggttcctggcccagatactgttgaatcagatgtctttcaataagggaataagcaatgaatttttttattttttttttcttttcatttgatgtttgctgagatgatttgcattggattttaggcaagaagagtggaaactagaaatcggaatccaagagtcaaaagtaacaaacagcaagtggttgtagatggttccgtttacgagtgtcagcagggaaactagggagtgtcctgctcaggatggtgcatctcccagacagcagcttgatcctgtggggagacgatggtgcaggaggagacgagcccagagcctctgcctgaaggcctctctttggagcccagcctcaacctcccaggctcaagtgatcctcccgcctcagcctcctgtactacagggactacaggcatgcatcaccatgcttgactaattcttgtatttttttgtggagataaagtctcactatgttgtccaggacgatcttgaactcctgacctcaaacgattgtcccaccatggcctcccaaagcattgggactacaggtgtgagccaccacacccggattcttctttttttttttttttttttttacctccctgtattcttactgcctttggcagccacctcatatactttgaaacaaaatagaaatatacttaagagatatctggagccattggcgccccctaaaggcatacctctaagaagtgtcagagggaggatatgaactagggtttctcaggttttttccccagcaaccgccatctcccagcacaagtaatgtctgcagtacagctgaagaattcacagaaggagcagagttatctcttcccggagaccagtctgacttcttttagcagatatttattgccctgtggtaggcgagaggtgtggaaatgaggcccagcccacatagtgcttacagcccaattcccacccagagccaaattcggagcccattcaggtttgagtgtaagtcagagtcccttctcatccagaccatcttctgagagaagagttaacatataataaacatcccttgaagagcacaaggttcaagaagaatcaattcttaatgcagtgtgtgtatggacctctggcctgtgtttttcagagagggcggtaggtacagacctcgattccgtgcagacatgaccaagagaggagcctgatacctttacatctaaaatgtaaagaagaggccgggcgcagtggctcacgcctgtaatcccagaactttgggaggccgaggctggtgaatcaattgaggccaggagttcgagaccagcctggaaaacatgataaaaccccatctctactaaaaatacaaaaattaaccaggtgtggtggtgggtgcctgtgatcccagctactcaggaggctaaggcaggaggatcgcttgaacctgggagccggaggttgcagtaagctgagatcatggcactgcactccagcctggatgacagagtgagactctgcatcaaaataaaaataaaaataaaaataaaaataaaaataaaaataaaatgtaagagaagaatcacagaggagtctgttgacattggaatcccaggacaagatttgacctctgtgctattaagacaaatgttttcattatccaggagcccaacctgtgctgtgtgccttgagtggtgggaggccagtttgtaacagcggctttgcagtgctgggggagaatgatcagctacacacaggaaccttgctcacagccccggaaactccacactgtgggcttcaccttctggaagtgacaaagtcatgtacgcaggaccttccccaccagtctccactgctgagcccataaagggaggtgtgaggacttggaaatgccacatgctttttaagaagccagctcaaaccaacctttgttacaactcgagaatgaaataagtactacaaactattcagccattgatatttatggctgtatgactttttttttttttaactttaaggacatcgtcctacttctgtaagtgtggggaggagtactccacttcacattgaactgcagtgagcggtggggtttcctttccgaattgctgtgtttcattcacagaactcagaccttccatctgcagaggccacaggcacaacaaagaacctgggtatccatgagctctggtgggttggttagtctgccttggtagacgtgttttccactgaccacaggacctggcccagacagccttttaagtgctggtgctataaacccaaacctaaaaatgaagcagggtcacatagtacagaaagcttgggctttatgcggatgatgacagccctccctttgtagtacgtaaggcaatgcataggatgatcactgctctccaactatttctgttgctgttttccccaccagctatcagatcatgctggactgctggcacagagacccaaaagaaaggccaagatttgcagaacttgtggaaaaactaggtgatttgcttcaagcaaatgtacaacaggtaaaactaaatttatttacatcaaaatgcctttgaatgtacgtcaggggggcattttatttgttttttttttaagagctattaatataatagctgagatcagaagtttaaaaaaagggtgtgtgtgtgtgtatacagaattatcttctcaaaacacaaccaagattgtgcaaatgacatagtcaaagttgacataatggttcatagaaattgttgaagtcagaattggtgcaacgagagctctacctttggtattttaggatggtaaagactacatcccaatcaatgccatactgacaggaaatagtgggtttacatactcaactcctgccttctctgaggacttcttcaaggaaagtatttcagctccgaagtttaattcaggaagctctgatgatgtcaggtaagatttctttctcaaactttatatcacagaattttccaacaaaaaaaagaaggaaagaaagacgaaagagaaagaaagacgaaagagagaaagaaagagagaaagaaagaaagagagaaagaaagaaagaaagattatgttgatcaccacccatatgcccatcccctaaattcaactgttaacattttgccctattttgtctattatactctctatgattgtgtttgttacggatttttctttttgccaaaccatttaaaaggaggcttaaggcataatagcactttactcctaaatactttagtatacattttggaagaaggctattgttgctgggcacagtggctcgtgcctgtaatcgcagcactttgggagactgaggtgggaggatcacttgagcctaggagttcaaaatctgcctcggcaacatagagagacctcatcttactaaaaatttaaaaattagccgggtgtggtggtgggcacctgtagtcccagctactcaggaggctgaggttggaggatcacttgagcccaggagatggaggctgcagtgggctatgattatgtgactgcactcaaagaaggacattctcctgtgtaaaccacaccaaaattatcgcaccaaataaattccttaatgccatctaatagtcagatttccataattccacccaagtgtctttacatgttttttttaaaagcaggatccaattaagaataacagattacattttcttaagtttcttgtctatcttattctagaaccttcccccatcttttcttttccccattacattgaattttttggtgaaaccttagataaaactaaacaaacaaagcgagctgtgttttcatttgttttgctttgttttgacctaacaaacgcatctatcccgtattactgcagagggaattggagaaggggcaaggcaagggaacaaatatgtactgtggccactgctggcccggggactgcacttcaggactgatagttaggcgtgcacgaaacctgggcagggatgacggttacacagacaagtgctgggtctggcaaggtgctaggctttttccatgtatcaactcctcttacgcccagagcagtcttgggaagaacatatcattcccgttacacaaatggggaccttaaggctcccagaaggaaggcttgccgaaactgtgtggctagaaagtggcagaataattttctaacccaggagttctgaccctccctccctgtacccgatgcagtcaggactccttttagggcctccagactgtactatgggcctctagcatctctctttgcagtaggcacagctctctggctctaacctcagttcagccaccagggaagatatgggaagaagctgcagcagtcagaaaatactgcttgcggccgggcacagtggctcacgcctgtaatcccagcactctgggaggccgagatgggtggatcacctgaggtcaggagttcaagaccagcctggccaacatggtgaaatcccatctctactaaaaatacaaaaattagctgggtgtggtggcacgtacctgtagtcccagctactcaggaggctgaggtgggagaatcacttgaaccagggaggcggaggtttcagtgagccgagatcgtgccactgcactccagcctgggtgacagagcaaggctctgtctccaaaaaaaaaaaaaaaaaaaaaaggaaaaaagaaaatactgctacccacctgtgacaggcctcaaagaaacccagtgggcaaatccagacttgtggtgatggattacaggtcagcctcactgttcaggcctcacaaccagcccaagaggctgaagcagatgtgtcatcattttgtaaagctgggaaaactagttcggattaaataaattggcaaggtctggctgggttagagagagggagggggggtgggtggcatggcaaagttatatgtggacccttctaaggctgcttagccttaagccagtagggagcttgcccaagacactgggactggcagagagtgacagagtatgggactgagaaattcagtcagtaggtgaacttgccttgtgagtaaccacagagtggatgtctccaatagtctttcctaatacatcatcaacaaaagtcagtaggtagttatagagacatcatacaacactacccaattctcccaatctgtaatcacacacacacacaaaatacaagcctggcgctagcactcgattatgccattaaataatatttagccgtgtagccatgccaggtcactttgccacctcacatccttttcagagcacctgataaagtcataccacttccctgcacatcatttctctcctgtgccattgggcactcagacgagatgatgcctccagtctctcctatgtctggcattctctgatttcacaacggaccagagtaggtccctctgggagtttcctcaaccctacagaatgtgaattgacaaccacgggaggcagtggcaatgctgtcaggattcccaggggtcacggcggggagatcggggcctcaggagttaggtgattcctgttggtgtgttggttcatcttagctgggatatggtgcctgtggtctcctgactcattagagctggatgccttttcctgtcttgataattctttctgtttcttcattagatacgtaaatgctttcaagttcatgagcctggaaagaatcaaaacctttgaagaacttttaccgaatgccacctccatgtttgatgtaagtcgtgaagttaaggtacctagtgcaccccgatagaccccttcttcagatcccttccaaacaccaacgccagtaatgtagtagttcttggtcagtgagggtctggattcaggagtggctgaaatgacagtgtggggaggactgacaactagacctagctgtgcagaactaatttgaaagtagagttccatgcactcactccaggacccaagtccctgcgtggtaggaatttagaccctgaggaaactccattgtgtgtttctaagctgcttagctgtcagtgatgcagctttgctttcagagtaacagaggaactcccagctgtgtgggtgatgggctttgtgatgtaacagagagcgcgttcctgcaagcagccttgaggctgggaggggtccacctaagccttatgctcctttcccctgaggttctacagattgaacagctgtgttcctacccaatcacaatgggagaagctaaccagtatagcctggcaaacaagaggtctcccagctcttctctctaaagccctgtgatgtggggttgaggggctaaggggaggagaggagcatgggcaggagcgatactgcagttctgatgttgcagactctgggactcactgtgatctccagataggcaggttcctacgacctaggaactggctagaaatgccagctctcgggacctgcccacacccactgagtcaggctgcaccttggcaagatccctaggggattcctgcacacattaatgtttaagaagtgctggtgaggccgggcgcagtggctcaagcctgtaatcccagcactttgggaggccaaggcaggcggatcacgaggtcaggagattgagaccatcctggctaacatggtgaaacccagtctctactaaaaacacaaaaaaattagctgggcgtggtggtgggctcctgtagtcccagctactaggaaggctgaggcaggagaatggcgtgaacccgggaggcggaggttgcagtgagccgagatcgcgccactgcactctagcagcctgggcgacagagctggactccgtctcaaaaaaaaaaggagtgctggcaatgaccttgtcccataaagggcctggaaggccaatgacagtgtgaaggtgatcaccacaatcagtgtggccttgaagcaagcacagtcacccttaaaaaaaaaaaaatcaaaaacgaaaaaccacaaccttgtcagacacaccagataaagggaaatattattttaaatattttaagcatcaaaaataagctgaagaatataaaggtgaagtatatggatatcttgtttgactgcttggcacatttttttcaaggccaagggaaaaatactgagcaaaacgtgaaagaattctcaaccttcaccctccccaccctaaatcagtggtgaatgatgacagcttctttatttgcttaggtgtttactcgtaattaaggacaggaacactgccctgtaagagccttaaagggtggcaggaacaaagcgtgggatccacttagtggaacatgccgtattaacaaagtagtgaagagtctgcaggcaactcactgccaaaagaaaccaacaaggaagtctaattgctggagaccatgaccaagggctgggggctgagaattccattgagttcaagaaaaaaaatcgaatgatgtctttacgatttcttagaatttgtgtctatgatggccaccactaccatagcatactcatagtcaatcgtgatctgccaaattagttttagtatctttgttgcaataaattgcatcacagtttactatggaaaatgctaacctgttacttgccatttccccttttgcctaaatgtatttacttcatgttcaggaagggcctcaaagtcactggggatcagacatgatttgcagcgggtcaagtttgtagtggccaacttagagaaatgctttgtctcaataggctgggattgtggagggtgaggcagagcctggatcaacagatgtatcccaggatcatccctcaggctcagcatggacccccgctgggccaggcaagagtataacctttctccttctccccctaggactaccagggcgacagcagcactctgttggcctctcccatgctgaagcgcttcacctggactgacagcaaacccaaggcctcgctcaagattgagtaagaattgggtatcttttctgtgatcagttgatggaggggtacgaggggagatgctgggggaaggtggtataatgagggatgtttgaggactacttgccctcctgaactgtggtatccgggagttgcagaaaaccatttccccccagagggcaaaaaaaggggaacatcaaacgggacatatgagcagcaagctctggggaaaacatgcagaaaatcttgcaaagacaggcagtccagatgtggccagcacagtgcctcaggtgaaagaagcctgatgtgcccacctatgcgtggtgcagacagagacacgctcccggcggtgggagaggatgcccccgctgtcactccctatgccggcagggttcatacacgaggagacacagtactgttttccggggctaagacctgtaccctgagagctcagcccctacagatgaatgactttcccatttcatcctggcacccttttctcacttgacaatttctccacaaagccctggcttgtagtccaccagctcctccctccacgccgtggccaccactggggagtccttgccttatgcaccaccgaatgccactgcagcttctctgtgcgagtctctaccttgcaatggtgctggactgggaaaagctgcacctgtcggatgttccttcctttcctcattcaaatgcctgtccctgtctcacccgaaggcagaaccttttcctctttcacctaaatccggggtaggcagccatttttttaaagggctagatagtcagcaaatgctccctactgccattagcaggggtgtccaatcttttgacttccctgggccacaatggaagaataattatcttgggtcacacatgaaatacacggacactgacaatcgctggtaagctaaaaaagttgcaaaaaaatctcagaatgttttaagaaagtttacgagtttgtgttgggctgcactcaaagccatcctgggattcatgcagcccgtgggccacaagttgggcaagcttgcattatagtataaaaagcaaccgtagacaatacatcatcaagtaggcatggctctgttcccacacactgtatttacagaaacaggtgggcatggccagtgagtacacgaaaagatgctcaacatcatcagtcattagggaaatacaaatcaagactaccatgaggggctgggtgtggtggctcatgcagtagtctcaacactttgggaggctgaggtgggtggatcacttgagcccgggagcaacatggcaaaaccctttctctactaaaactacagaaattagccggggtgtgctggcatgtgcctgtagtcccagctacttgggaggctggggtgggaggatcacttgagcttgggaggttgaggctgcagtgagccacaattgcaccactacactctagcctgggtgacagagggagaaaaaagggaaagaaattaccataagataccactttacgcccatgaggatagctagatgaagtcagtgtggcgaggatatggagaaattggaaccctcatacactgctggtggaaatgtaaaatggggcagtcactttggaaaacagtttagctgttgcccataaggttaaacagttatcccgagactcagcaattcaactcctaggcatatactcaagagaaatgaaaactgatgtccacagcaaaacttgcacacagatgttcatagcagcattattcatgatagccaaaagtagaaacaacctaaatatccatcagttgatgactcaatgaataaagtatggtatatccacacaatataatattgtcaataaaaagtgtgaagtatgcatgcatgctacaatatggatgaaccttgaaaatattatgctaagtaaaagaagccagtcataaaatatttcctattgcatgattccttttacatgaaatgcccagaattggtaaatctagagacagaaagtagaccagtagtttccttgggctggggctggagggcgtgaggaagaaagactgctaacaggtgtgcgttttgggggatgatgacaacgctctaaagttgattatggtgatggttgcacaatttgtgtctatacaaaaaaccattggcttacacattttaaataggcgaattatgcactatgtaaattatatctccataaagctctcattaaaaaaaaaaacaccagacaggtgggcagatatgggttatagtttttgaaccctgatctaaatcaaaggatggcaacaagtgcctccaagtgatgtagttagcacaactcatcggccacaagtaaatgggaaagacaggggcatttccaggcaaacatctgcgtgtgtgtttccttttcacatgagcacagtggtattagaattgagttacagtagatcagaggcaccaatgaggaatgaatggatcaaaggggaaggtaggatacttgctcttttgtttcctactttggaacacttcagaaaatgggtggtgactaattttatctagatatttgttaaagaagaccataaattgtatcctctactctgagactgaaaatatagaacatggacacgttagtccagaccggtctaaaacaagcttcacgggttccctgcctcatcccagatcctttgaaaataaaaaatttgaacgaatattaaagggcaagagcagcgcttcttcctcaggtgtctgtcctagtctggatgtaacacagaggacccagaagcaagtttctccacccttgagccttgctggtgataagcagcaccgtgactaaaacgtttcctcttctagaacacaggcacgacaggcagagaggcactcacttgtgtgtgtggagctttattgttttttgagactgttgtaacaagttaccactaacttggcaacttacaagagaaatttattctcttgcagttctggaggccagaagggatataaaatatgaaaaatttgaatattttggagggtaggaggcatttctcagcctaccacagaagctgtttgacccaagaataggagagggctgcacccaagtcttggagttactttccacctggattatggatttgcgttatcttatcatacatttcataccctcccccagccactgtctttctgcccaatgacaccaagctgttaagagggaggccgtgtgcagctttagaacagaggaaatctgacagcaattgagggggggggggttccaaaaccatgaactctagacaggtatgaacaaatgacccactcagaaagagtagattttagtgtctttgttttctaaaaaaccaattttgaatatttgatttctttcctttctttctttagcttgagagtaaccagtaaaagtaaggagtcggggctgtctgatgtcagcaggcccagtttctgccattccagctgtgggcacgtcagcgaaggcaagcgcaggttcacctacgaccacgctgagctggaaaggaaaatcgcgtgctgctccccgcccccagactacaactcggtggtcctgtactccaccccacccatctagagtttgacacgaagccttatttctagaagcacatgtgtatttatacccccaggaaactagcttttgccagtattatgcatatataagtttacacctttatctttccatgggagccagctgctttttgtgatttttttaatagtgcttttttttttttgactaacaagaatgtaactccagatagagaaatagtgacaagtgaagaacactactgctaaatcctcatgttactcagtgttagagaaatccttcctaaacccaatgacttccctgctccaacccccgccacctcagggcacgcaggaccagtttgattgaggagctgcactgatcacccaatgcatcacgtaccccactgggccagccctgcagcccaaaacccagggcaacaagcccgttagccccagggatcactggctggcctgagcaacatctcgggagtcctctagcaggcctaagacatgtgaggaggaaaaggaaaaaaagcaaaaagcaagggagaaaagagaaaccgggagaaggcatgagaaagaatttgagacgcaccatgtgggcacggagggggacggggctcagcaatgccatttcagtggcttcccagctctgacccttctacatttgagggcccagccaggagcagatggacagcgatgaggggacattttctggattctgggaggcaagaaaaggacaaatatcttttttggaactaaagcaaattttagaactttacctatggaagtggttctatgtccattctcattcgtggcatgttttgatttgtagcactgagggtggcactcaactctgagcccatacttttggctcctctagtaagatgcactgaaaacttagccagagttaggttgtctccaggccatgatggccttacactgaaaatgtcacattctattttgggtattaatatatagtccagacacttaactcaatttcttggtattattctgttttgcacagttagttgtgaaagaaagctgagaagaatgaaaatgcagtcctgaggagaggagttttctccatatcaaaacgagggctgatggaggaaaaaggtcaataaggtcaagggaaaaccccgtctctataccaaccaaaccaattcaccaacacagttgggacccaaaacacaggaagtcagtcacgtttccttttcatttaatggggattccactatctcacactaatctgaaaggatgtggaagagcattagctggcgcatattaagcactttaagctccttgagtaaaaaggtggtatgtaatttatgcaaggtatttctccagttgggactcaggatattagttaatgagccatcactagaagaaaagcccattttcaactgctttgaaacttgcctggggtctgagcatgatgggaatagggagacagggtaggaaagggcgcctactcttcagggtctaaagatcaagtgggccttggatcgctaagctggctctgtttgatgctatttatgcaagttagggtctatgtatttatgatgtctgcaccttctgcagccagtcagaagctggagaggcaacagtggattgctgcttcttggggagaagagtatgcttccttttatccatgtaatttaactgtagaacctgagctctaagtaaccgaagaatgtatgcctctgttcttatgtgccacatccttgtttaaaggctctctgtatgaagagatgggaccgtcatcagcacattccctagtgagcctactggctcctggcagcggcttttgtggaagactcactagccagaagagaggagtgggacagtcctctccaccaagatctaaatccaaacaaaagcaggctagagccagaagagaggacaaatctttgttcttcctcttctttacatacgcaaaccacctgtgacagctggcaattttataaatcaggtaactggaaggaggttaaacacagaaaaaagaagacctcagtcaattctctacttttttttttttttccaaatcagataatagcccagcaaatagtgataacaaataaaaccttagctattcatgtcttgatttcaataattaattcttaatcattaagagaccataataaatactccttttcaagagaaaagcaaaaccattagaattgttactcagctccttcaaactcaggtttgtagcatacatgagtccatccatcagtcaaagaatggttccatctggagtcttaatgtagaaagaaaaatggagacttgtaataatgagctagttacaaagtgcttgttcattaaaatagcactgaaaattgaaacatgaattaactgataatattccaatcatttgccatttatgacaaaaatggttggcactaacaaagaacgagcacttcctttcagagtttctgagataatgtacgtggaacagtctgggtggaatggggctgaaaccatgtgcaagtctgtgtcttgtcagtccaagaagtgacaccgagatgttaattttagggacccgtgccttgtttcctagcccacaagaatgcaaacatcaaacagatactcgctagcctcatttaaattgattaaaggaggagtgcatctttggccgacagtggtgtaactgtatgtgtgtgtgtgtgtgtgtgtgtgtgtgtgtgtgtgggtgtatgtgtgttttgtgcataactatttaaggaaactggaattttaaagttacttttatacaaaccaagaatatatgctacagatataagacagacatggtttggtcctatatttctagtcatgatgaatgtattttgtataccatcttcatataataaacttccaaaaacacatatattttctccctgatttgcttgttaagtgtaaaaaagaggtcacaggtgtccctgggggtggaggactagtgctctttattaaacacagcacaagaaagataaagcaaatgctgctgaagagagggcaaagaggtttctatcggtcctagaaaatggctgtgctaaacaatcagaacactgcaaccagtaagtaaaaaacaaaatcaaactaggcagattgcccagaaaactaaaccctaacatcaacaggatcatgaaacaagtaaagcatatgctgggtgtgagtgccagccgcagagaaaagtgccctcaattaaaaagaggcagttgtccccaaacactaattttcagctgataaataattagcataatcacagagggtgtgtacacatgctgcagaaaaccacacaaaataataggcaaaagcttgaaacccaagaatgtaaaagtacacatgccagctctgtattcttcaatcttgttttgtggattatgtcctaggaaaacaactcaggtcactaagtactagaaattgaataagtgaccaacactttgtcttagaaattggtcatagtattacccgcctaatatcatcat

SEQ ID NO: 21 - DNA, 1500 bp, Mouse
acagctcaggcgggctgggcccaggctcagaactctgtcctggctatgtacactgtggggtgctctgggctttttgaggctgtgtgattcaccctggggccttcgttcagagcatggtgtaggagcagacagacaaacaccatcccttgcagacaggcactctgagggctattctcttgcaaagataactaagcaccaggccagtaatgggatcctcagactgggcccagaaaaccactctagggaagttcagggtaggctctctgcaccccctcctcctaatcccgtctccttagtgtctttccgccagcacaggaatgggggaggggtgggtgacgaggatgaacaccggagtccctggaggaagggaagcagggtatctccatctgaggctctgtctttgaggagaggtggagagctggggaagtcttgtgtgaggggattggggctcaggagggggttggggagcaggaagttgtccccaggggagccatcctggcccattcaagggttgagtacttgtttagggttagagctgccccctctggggaccaggattgtccagccaaggccattgtcctgcccccttcccccagtccctcccaggcccctttgaacctgaagtcagatatttcttctctctacccacctcccacccgttgggtttctccacccaggaactaggctggaagcctgggatgaggaggtggggggagggagaactgagaatcttgaggaaagaggccccggccttaactgtgaggggatggagcctgggtgcaggtcttatgggggttggggggtggttagtgtctaatctaccaacctggacaacacaagatggaatactgtgctctgaaaacgcagagccagcacttctctggggtctctggggacatatctggttggggctcggggtcccatggtgtagagcctctaaactctggaggactggaggtgcaatggctgtcttgtcctggccttggacatgggctgaaatactgggttcacccatatctaggactctagacgggtgggtaagcaagaactgaggagtggccccagaaataattggcacacgaacattcaatggatgttttaggctctccagaggatggctgagtgggctgtaaggacaggccgagagggtgcagtgccaacaggctttgtggtgcgatggggcatccgagcaactggtttgtgaggtgtccggtgacccaaggcaggggtgagaggaccttgaaggttgaaaatgaaggcctcctggggtcccgtcctaagggttgtcctgtccagacgtccccaacctccgtctggaagacacaggcagatagcgctcgcctcagtttctcccacccccacagctctgctcctccacccacccagggggcggggccagaggtcaaggctagagggtgggattggggagggagaggtgaaaccgtccctaggtgagccgtctttccaccaggcccccggctcggggtgcccaccttcccc

SEQ ID NO: 22 - DNA, 1500 bp, Mouse
agacgtgccccacgtcccctgcgtgcagcgactacgaccgagagccgcgccagtggctggtgtcccgccgagagttcctcagagcaggcggggacaactcccagacggctggggctccagctgcgggcgcggaggttggcctcgctcgcaggggctggacccagccggggtgggaggatggaggaggggcgggcgggctcttcggtgagtggggcggggcctctgggtccacgtgactcctaggggctggaagaaaaacagagcctgtctgctccagagtctcattatattcaaatattcattttaggagccattccgtagtgccattcggagcgacgcactgccgcagcttctctgagcctttccagcaagtttgttcaagattggctcccaagaatcatggactgttattatatgccttgttttctgtcagtgagtagacacctcttctttccccttcttgggatttcactctgtcctcccatccctgaccactgtctgtccctcccgtcggacttccatttcagtgcccgcgccctactctcaggcagcgctatggttctctttctggtccctgcaaggccagacactcgaaatgtacgggctccttttaaagcgctcccactgttttctctgatccgctgcgttgcaagaaagagggagcgcgagggaccaaatagatgaaaggtcctcaggttggggctgtcccttgagggctaaccactcccttcccagtcccgtcccactagcctgggaaggccagttccttgcctcataaaaaaaaaaaaaaaaaaaccaaaaaaaacaaaaccatgttcgttttggaatcacccctaccgttccctgggaacaagactctttagtgagcattttcaacgcagcgactacaatgaaataaatcacaaagtcactggggcagccccctgactccttttcccagtcactggaccttgctgcccggtccaagccctgccggcacagctctgttctcccctcctcctgttcttaaccagctggaagttgtggaaattgggctggagggcggaggaagggcgggggtggggggggggtggagaaggtgggggggaggctgaaggtccgaagtgaagagcgatggcattttaattctccctcccccacccccctttacctcctcaatgttaactgtttatccttgaagaagccacgctgagatcatggctcagatagccgttgggacaggatggaggctatctgatttggggttatttgagtgtaaacaagttagaccaagtaattacagggcgattcttactttcgggccgtgcatggctgcagctggtgtgtgtgtgtgtagggtgtgagggagaaaacacaaacttgatctttcggacctgttttacatcttgaccgtcggttgctacccctatatgcatatgcagagacatctctatttctcgctattgatcggtgtttatttattctttaaccttccaccccaaccccctccccagagacacc

SEQ ID NO: 23 - DNA, 1500 bp, Mouse
attaagcctggaagagaaggtgacccttacccagttgttcaactcacccttcagattaaaaataactgaggtaagggcctgggtaggggaggtggtgtgagacgctcctgtctctcctctatctgcccatcggccctttggggaggaggaatgtgcccaaggactaaaaaaaggccatggagccagaggggcgagggcaacagacctttcatgggcaaaccttggggccctgctgtcctcctgtcacctccagagccaagggatcaaaggaggaggagccaggacaggagggaagtgggagggagggtcccagcagaggactccaaatttaggcagcaggcatatgggatgggatataaaggggctggagcactgagagctgtcagacagagatttctccaacccaggtaagagggagtttcgggtgggggctcttcacccacaccagacctctccccacctagaaggaaactgcctttcctggaagtggggttcaggccggtcagagatctgacagggtggccttccaccagcctgggaagttctcagtggcaggtttccacaagaaacactggatgccccttcccttacgctgtctcctccatcttcctcctggggatgctcctccccgtcttggtttatcttggctcttcgtcttcagcaagatttgccctgtgctgtccactccatctttctctactgtctccgtgccttgccttgccttcttgcgtgtccttcctttccacccatttctcacttcaccttttctccccttctcatttgtattcatccttccttccttccttccttccttccttccttccttccttccttccttcctttctcccttccttccttccttccttccttccttccttccttccttccttccttccttccttccttccttccttccttccttcctgtgtcagagtgctgagaatcacacctggggttcccacccttatgtaaacaatcttccagtgagccacagcttcagtgctgctgggtgctctcttaccttcctcaccccctggcttgtcctgttccatcctggtcaggatctctggattggtctcccagcctctgctactcctcttcctgcctgttcctctctccgtccagctgcgccactgtggtgcctcgttccagctgtggtccacattcttcaggattctctgaaaagttaaccaggtgagaatgtttcccctgtagacagcagatcacgattctcccggaagtcaggcttccagccctctctttctctgcccagctgcccggcactcttagcaaacctcaggcacccttaccccacatagacctctgacagagaagcaggcactttacatagagtcctggtgggagagccataggctacggtgtaaaagaggcagggaagtggtggtgtaggaaagtcaggacttcacatagaagcctagcccacaccagaaatgacagacagatccctcctatctcccccataagagtttgagtgacaga

SEQ ID NO: 24 - DNA, 1500 bp, Mouse
tttccaattgagctccccacggtgcccttgtatctttttacagcccctaacaactcacaccagtaacacaattacctccagatatttataacaagaaattactttactattttctccacctcactcccaagaaccctctttttgagggaaagcccggaggactggacgccttgaggggcgctgtggcaagtcagtacttcagtgagtggagtcctcattttttcctttgggagttgcagagttgttggtttctttgcttggacctgatgtagctgggttgagagcctgggctttactgtctgggtttggggagagccacagaataaaagccattgtttggtgtctgtagactttgtctacacccccttcccgtttgtactttttaaaacagcgaggcgaggtggacagcttgtgtcacggtacaggaaaagaggaagatgtaaacaccaaaagcaaagttagctacaataaatgagatctagggtaaaaggctcaccacttgctcagtcaggaaggagctgagagatggactgtgggggtctgactggaaagcgtttttggggggtgggggggtggttaagtataaaggagtgcccagagagcttagctcctcaggaaagttgggagcttggtctgaggttcacccagacttcctaacctgaggcccaaggcaccaccaggtccttcccttcttcctctgcacactcccttccccagcgctgtctctcctcccctctctaatgttttagtttaaaccttctcctttccctggtacttggtagttttgcaaagtgagacccacaactcaattttccccattttcccaagcctagccaatacagccttttcctgagcatttaaatttcagtgggagaggccactggaagcttggggtgggtttggtgtttctaggcagaaggatctagcctcagatttactttaagtggactgcagacagacagccaactatgtgctgggccagtttgacacacctttctctgttttgtcttaggcagaagactttaaccaagggcggtgagcagatgtgtgagatcttctattctagaagtggacgtatatcccagttctcaggcaagttttatggtgctgttttgggcttcaaaatctgaaggactttttaaagaccgtagttcatgtgggaaaacaaatcaaaacccgatcattgtttctgtttcttccgatgaaagggttaactactaaaaaattcggggaattgtgaatgttggattattttattcgctgctcacaaattacattttgcatgcatatgggggcaagactatgtgacccttagatcgccccaagcggttgagtagctcaattctaagaaaagggggattctccagttcaggcaccaggttttcctcagcaggagtacaggcctacctgtgcaaagcctaggattaactccaagtttcttcctaacagagccccgtattcgagccccgtgggatccggaggctgccaaccagctccagc

SEQ ID NO: 25 - DNA, 1500 bp, Mouse
cttgaaactcactctatagactaggtcagcctagacttctctgagatcctcctgcctctgcctcaaaggcagaagacaacacttcaaatgacactttttaacacctagaagctaaagagaaaagaaactgaaattttcaatttttataagacagtcctggtctctgcaggcagagaacacagatcctcctgaagtcatcccacaaggcccattattgattttttttctcctgccctacccccacctactgccctgtttgttttagttacgaaatgctttgggcaccttggatttaactgaaaagtaaccttgaaacaccgaggccctcatgccagaggcaaatcgctgcctcccgggtattggctgcagctaaacgggtctctccaggccgactgaggtgggtagccagaaagaggactgaggtaactgacgaccagggcggccagaccacgcgagtcctacgcgcctcctgaggccgccccgggacttaactgtaacggggaggggcctccggagcagcggccagcgagttaaaggtgtgtacacagtttttctaaataggacagcgctttgcaaattggctgtcacctgcttgttgttttgacagggaatgtgcactaaaagggaggaaacccgagataaataaatctggcttgcctcgctttgcaggccaccaaggcggtacgcgccttcggattgacgaaccccgtgcttggggcgatgaggaggggcggggcgggagcaggagacctgagtttctccaagggtggcttgatcccaggtctctgggtccacggaagactccccgtggacgtaaaggaagggactccaccagggcgccagcacgcctgcttgcaggtcggggtcttgggagtgccagggacagcaggagatgggctagctcggggcgcccagcggcaggtgcggaacgctagccctggcttcctctcacctaagtgtgagctgattattcaaatgggctgcccggggtctggggattggaggccagcgccagcgcaccgcgctatatcaccagccgctcacgtcattgcggcacttgtccgctgcgcggtccacacctcctcctcctcctcctccccctcctctcgctctccccccgcccgcccccacgccgctagcttcccgccgcctcccggcagctcgacactgccagcctcagcctgcaccggcagccccgggagcgcggcgacagagtgcacgcccgacggcgagtctcgggttccggcctccagggttcttcggccccctcctccgccagccaccttcccgcccactcccagctacttcccgccgcaggccgcgggagagagagaggaagtggagtccagagagggagagagggggagcgcgagagagggcgggagggaggggacggtaccattgctgacttttttttttaagagggtgggggtgggggctgattgctggtcgtttgttgtggctgttaaattttaaaccgccatgcactcggcttccagt

SEQ ID NO: 26 - DNA, 1500 bp, Mouse
catgaacgtatttttctgccccccacatctcaagtgctggaattatagaattacaggcactaggcatctcatagactgtctttcggaattgtactagatgaacattcaaactgagctcgatcaccattcctttgagttttcctaccttaaaactacgcaaggatgaccgttggatctggtagagaacaacacaaacatgcaaacaaactcaaatgtaacacagagcttttggagctccttgtctgaaggagggctgctaagtgtgtgtaacactctcccagtgtctgccttaacaggtgatgagtctccctttcctctcctagaatctataatgctgcccttgaaaaagactacgtctagaactaaatgagtttgctaatatttggagggtgctgagtggttgctgggataagcattgtaggaaggcatgttttgaagcccgtgggaaagtactttcaggtttaaaataaatttaagggtggtcagcttttcattccagtcttaagaaaacgttgtaaccgtctgtcaggctaacagtcttacacgctacggatttgctgcttaaatggactgatccttttcctccgaggaacagcacagtgctgctgtctttgcactttattttacattttaatctcgtggtgtttgcgatggaatcatggccttgcaagtctttagaaataaaaccagatcttgcctcttttgccgaacacacaaaaggagcttttgttttatatttttatgtttcacactgaaattcctcagggttgacttgagctcttattgagcagtgatatattagtgatatagcattttatgttaaactttgttttattacaacttgctatttaccttggatatttttattataatataagcatgatggatgagttcttgggagaagaacaggattttttttctctgaaaaatcatgctaagttaattaccttcggtaatatttttttaaaagaatggaataaatacctatacctagtatgttgatgtgaacaaccttggacttgttcttcaatcttccgttacagtgagcagcacctccagacatctgaatttcagccttcctatttccccaagaggtcttggcgccagcgcccggctccagccagttttccccaaggcaggtgtagccagaacactgccgggggaggggaaaggggcgggtgtgggacttgggactcggaccactggctgggcgggggcctaaggactagggtccggtccgcccccgcctcgccattggccgcgtccataaagaaaagggccccgcggcccggggggacacccgcagtgtcactgggtagatctccagcgcggattaggcgaagggttaggtctaccaggagagcagcgggagggtagcacccgctcagctttacgagttcctctgggcatctccaggctagcttccgatccctgcctcagggtcgggggaagcggcgtgtcccgtggccatagcagagctcggggtcggtctggagagcc

SEQ ID NO: 27 - DNA, 1500 bp, Mouse
caccaggacaggactaggcatgactactgtcttcaaataaatagtgactactctttctaggaagtttaaagaggaattgatccaagaaagaattatctcttctgtttagtttctttttttcttttccaggatggggttttggcttaattctgccacccaccctcaccctcagtagaagttattccatgggcagactttatctatctatctatctatctatctatctatctatctatctatctatctatctatctatctacctacctacctccctatccatctatcatctatctatctatctatctatctatctatctatctatctatctatctatcatctatctatctatctatcattctgttcatctgtgtagaggctagtctgttattccatttcaggactcttttgagtgataaaacaagcaaggaaacacttttcccttctccttcattttgccttgactcctgtggttgattacagaatttgtacacctttctgaagatgaggacacaagatgaggtcataagacatagatttctttcattgtataaccagatataaagaagaatgcttctcctcctcctcctcttcctcctcctcctctcttcctccttttccttcttctcctccttcctcttctccttcttgtcactgaatagtccctgtatatttaggaaccatggggttgatttggatgtagtcttgactgactcataagtgagataactggtctgctactaattattatcctgtggtgttagaggaagtatgttacgatggcaaagaccatcatcactgtcattggagtgcctgttctagtgtctcctctaaagcaccccgagaaagaggttcatgttagatgaaaacattctactccagacccgtttcacacatagcctgagcatggggtggggacacaagacttctgaaagtcctctgcacttgttttttattgctctggcttcttctcagttcacatttgagacactgtgtgctttatggaagattctaactttaaaaagatgagaaagacttggaagccctataatgagacccacccctccctcatacacattcttcattacctgtacataaaagcatatttgggatgaacaacctatgcaattcagttcttagcttttaaatgtggcatgcttccatgccaaggcccacactgaaatgctcaaatgggagacaaagagattaagctcttatgtaaaatttgctgttttacataactttaatgaatggacaaagtcttgtgcatgggggtgggggtggggttagaggggaacagctccagatggcaaacatacgcaagggatttagtcaaacaactttttggcaaagatggtatgattttgtaatggggtaggaaccaatgaaatgcgaggtaagtatggttaatgatctacagttattggttaaagaagtatattagagcgagtctttctgcacacagatcacctttcctatcaaccccactagcctctggcaaa

SEQ ID NO: 28 - DNA, 1500 bp, Mouse
gggaaagagagagagagagagagagagagagagagagagagagtcagagtttagaaagctaatgttaaactctggcctgtcattgctgtgttcttatctacactttattttgaggacagaaagaagtgcaggtacagtctgaaaatatggtcatactgcgtgtttgttttcccattttctattactaatatattatgggaatctttccattgcattaaatgttactctatgaactaggtttgatcgtagtactcccctccattttatgagtacactatattttctagtgtaagttatttgtttttataatcacatctttaacataaccgctcctaggctctgcgatggctcagtagttaagggcacctttctgctcttccagaggacctgggttcaattttcagtgcccacatggcagctcacaaccatctgtaactctagttccaggggatccaatatcctcttcagacctcttcaggaaacagctatgcacatagcacacaggcatatgttcaaccaaaacactgaaacacataaaagaaatgtttaaagaatgaatttaaaaaaataaaaaataaactcaactacatatgaagccttagcaaacatgtctggacctctagacacacagactctgacacgccaacgtctgagttctagtttcgatacgcactgggaagttttaaaagttttccatcaactctaatgtgtagagaaatggaaactatcatagactctacggcattgagggtgaaggtatgagtgaagcactcttagggtcagaagtatgtcagtgcccatttgttgctgttagcatcatcatcttagggcttgagaggatgttgcagctgacccatgcacctgtgacatacatatggaattattctttggcacataaaattagaatgggagctggctcatcaggttttgtgctgtaagttttctatgttaaaccagatgcgatacactaaataaaataaaatatacttgaccgatggttttgagcgaaataataactggataatcaagaaatatatccactaatgaatagcctgaactactgaaacaatttgttcagtgcctagcatatggtgtgcattttattatttctttcaaaaagaatgtatttggagttacatagtaagtctgctaccttttctttatggctatatctatgtcttatgttgagatgaatgaattattcttcaggggaaataatctatttgaacagtttagatggtgaagaacatttgcagcatttgcaagatttttttccactctgaagtggtctttgtccttgaacataggatacaagtgacccctgctctgttaattattggcaaattgcctaacttcaacgtaaggaaatagagtcatatgtttgctcactgaaggttactagttaacaggcatcccttaaacaggatataaaaggacttcagcaggactgctcgaaacatcccacttccagcactgcctgcggtgaaggaaccagcagcc

SEQ ID NO: 29 - DNA, 1500 bp, Mouse
tggtgctgaccgattccaacctcagggtttctccctcctcattcagcaggagtggtcatccagctggcgaggagggggtgcgggggtgcagaggggctctttcccccagaaaacaagctggaaagccagaaagcattataaaaattgaccaggaaggaccgaagaaaaggcccggggagcaggagaaggggacagatgcaagggggtggcagaggttgaggtgggggatggagaggcaggcaatctggttcaaacttagctgtttctacatatctggtctatggactcagaccccaacctgtccagacacagtataatctacaggaaggacagtggttctctcttccttgctgttcccatagctactagaaggtgtctagcaaatactggttaaatctatgtgctcttgggttggctgtgttctcagctggtaaagtggtctgcctgaggagtatgaggccttgggtttggtcctcagcaccctgtaacctgaaagtgatggagtctcatgcctgggatcccagcacttcaaaagtgggacgggaagatcaggagttgaaggccatcctcagctacatggaaagttcaagaccagcccgagctacatgagaccctgtctcaaaaaagaaggaggaggaggaggaggaggaggaggtaaatggtaggtgtccagacatagggatacctcttctacataatcacaaaggccccgataaagcctccagggaatgagttgaatgaggacatgtgtacccacgcgtttgaggatatgtatttccacggttccctatggagccacagcagtgtcttggaaccatggggccggagcagaaaaaccaagagacctgccctcaggttcgtgtttctcttctttttgagctcccaattttctttccccaggattcctggggttctaggactgcccccagacttaagctggcgacatgccacaaaatcttcaccctagtgaacccctcttctgtctgtgtaaatggagtttgtttgtttgtttgtttgtttgtttgttttcgagataaggtttctctgtgtagccctggctgtcctggaactcactctgtagcccaggctggcctcgaactcagaaattcgcctgcctctgcctcccaagtgctgggataaaggcgtgcgccaccacgcccggaataaacggatatttaaaacgccattttttgccctgaaaacagacactcaggggctaacaccacctgctatcctttgtgcaccccttagttatccactccctgtgtcggtgaggatggcaggtatgctgagggcgtgtgcagaagtggagaagggctgcgacctgttaggtcacaggaatcccgatcctggcgcccccggctccggtggctggggcgtggcctgctgggggaggtccctacctcctcccgcggcgatataacaacaggtcgaggactgccaccctccgcggcggaactcctgttctggtctctcgcttcgctctcctctccagacaag

SEQ ID NO: 30 - DNA, 1500 bp, Mouse
cctagtagagctgcgggtggtggtggcccagactctcttaggaatgaggcaactcaggttgcgcaaccttccctaccggaggtttagtctagtccttcaggaaaagcctctggtcccatttaggagccattttatcacgggtatctggcaggttctattgaggctatttttcaaacctgcagtatttacagggacaagactgggctgctccggggaggccgggacgacttcagccttccagttaatggatgcataattgaggaacaacgtggaattagtgtcatcgtaaatgatctagtgtctcaagttaatttcacccgttttttgttccaagaacattcgagtcagtcatcttggctagccggcttccaccaaaaagatttgttttccatccagcgtttcagacctagagttcaagttcttggcccttacaagttgcaggagcgtgtctcacgccttggcttttttttttttttttttttttttttttaaggtaacatgttattccttgttttgcttctaggaagcagagggttgaggaaatggcttgggcgggtgcattaatgcagccgaaaaagacacagactccctcccttgggacccgcgcggccccgcgctctttccgaaggtgcctggcaaggcgtccggttccctcggacgctccgggtccaagtgccttaagcggagggtctctggcgccttccttcgctgtctggcaacagtctggcggggtcagggaccggcgggaccgctcgggagagggctcgactgcgcctcgttcctcggtgccagggacaccgtcgcgggaggcgcggccagcttccctaggataagacttcccgccccgggggcagggcggtgcacttagacggtcccctcctcagtttcgggcggtcaccagagctgagtaagctcggtggagggagctgggtaaggatttcctgagagcgatgggcaggaggggctggggcagcagagcacagagcaaggaccctgaacctgcgaacctgtccggcgacccgcgcgcctagcgccaccgcacgcgcgctctggcccccgggctacccgccctcgccggcccccgcccctccgggaggaagaagagggtaggtggggaggcggatgaggggtgggggaccccttgacgtcactggaaggaggtgccggggtaggaagtgggctggggaaaggttataaatcgcccccgccctcggctgcacttcagcgaggtccttgagaggctcggagcgcggtggcggacactcccgggaggtagtgctagtggtggtggctgctgctcggagcgggctccgggactcaagcgcagcggctagcggacgcgggacggcgaggatccccccacaccacccccctcggctgcaggcgcggagaagggctctcgcggcgccaagcagaagcaggaggggaccggctcgagcggctgcgccgtcggcctcggagagcgcgggcaccgggccaacaggccgcgtcttgctcacc

SEQ ID NO: 31 - DNA, 6773 bp, Mouse
acagctcaggcgggctgggcccaggctcagaactctgtcctggctatgtacactgtggggtgctctgggctttttgaggctgtgtgattcaccctggggccttcgttcagagcatggtgtaggagcagacagacaaacaccatcccttgcagacaggcactctgagggctattctcttgcaaagataactaagcaccaggccagtaatgggatcctcagactgggcccagaaaaccactctagggaagttcagggtaggctctctgcaccccctcctcctaatcccgtctccttagtgtctttccgccagcacaggaatgggggaggggtgggtgacgaggatgaacaccggagtccctggaggaagggaagcagggtatctccatctgaggctctgtctttgaggagaggtggagagctggggaagtcttgtgtgaggggattggggctcaggagggggttggggagcaggaagttgtccccaggggagccatcctggcccattcaagggttgagtacttgtttagggttagagctgccccctctggggaccaggattgtccagccaaggccattgtcctgcccccttcccccagtccctcccaggcccctttgaacctgaagtcagatatttcttctctctacccacctcccacccgttgggtttctccacccaggaactaggctggaagcctgggatgaggaggtggggggagggagaactgagaatcttgaggaaagaggccccggccttaactgtgaggggatggagcctgggtgcaggtcttatgggggttggggggtggttagtgtctaatctaccaacctggacaacacaagatggaatactgtgctctgaaaacgcagagccagcacttctctggggtctctggggacatatctggttggggctcggggtcccatggtgtagagcctctaaactctggaggactggaggtgcaatggctgtcttgtcctggccttggacatgggctgaaatactgggttcacccatatctaggactctagacgggtgggtaagcaagaactgaggagtggccccagaaataattggcacacgaacattcaatggatgttttaggctctccagaggatggctgagtgggctgtaaggacaggccgagagggtgcagtgccaacaggctttgtggtgcgatggggcatccgagcaactggtttgtgaggtgtccggtgacccaaggcaggggtgagaggaccttgaaggttgaaaatgaaggcctcctggggtcccgtcctaagggttgtcctgtccagacgtccccaacctccgtctggaagacacaggcagatagcgctcgcctcagtttctcccacccccacagctctgctcctccacccacccagggggcggggccagaggtcaaggctagagggtgggattggggagggagaggtgaaaccgtccctaggtgagccgtctttccaccaggcccccggctcggggtgcccaccttccccatggctggacacctggcttcagacttcgccttctcacccccaccaggtgggggtgatgggtcagcagggctggagccgggctgggtggatcctcgaacctggctaagcttccaagggcctccaggtgggcctggaatcggaccaggctcagaggtattggggatctccccatgtccgcccgcatacgagttctgcggagggatggcatactgtggacctcaggttggactgggcctagtcccccaagttggcgtggagactttgcagcctgagggccaggcaggagcacgagtggaaagcaactcagagggaacctcctctgagccctgtgccgaccgccccaatgccgtgaagttggagaaggtggaaccaactcccgaggaggtaagtgaagggacttggctgggctggcagaggcagcagtgaagggaattgggaacatgtagggtagccaccctgcctgccaaaggtggtgatggctgccgggcctcctgagaagcacgacgcagtgtggactagaacccagaattgcaagaatcagaaaccggcctggattgtttcggcctggcccttgtcatgtaggtcacctaggcctggcctgtgtcccgacacttgcttcatgccatcactgtctgtacaccagtgatgcgtgaaaatcagcccccccccaaaaaaaaaaacatatcagcccctctggggacttggatcacagtcggacccaggaacttggccttaaggttaggcatggctgggggggtaaaaaatggtgcttatcctggagttattgttactgaagaggttgggtgtgactggctgctgataggagctcttgtttgggccatgtgtggagtagggctcaccttcagtcaagtttacggcctgtctactttagcctcagactccatgagtcacctttacacgagcagacccttgtagtgcctgaggtgcagatctgatcgatttcagcctttctacctttccttgtaaacaagaaagggacacccttgggtaggggagttttatctccaggccatcttaagatcattctgtgagtgcacgggccttgcttagtgtctgatggcctacagccagcactctggagcaagtgtaagcaattagccttaagaacaaggtgcgagtggataccgatgcccgccgggagttccgacagcttagcgattgttgtagcaggagtcccctccctaagtgccagtttctgtgttatctcaggtcctgtatgccgccgggagtcccctaggaaggcattaatagtttatctcacatcttaaatggcccttaatgaagcaagagatttgaaccttagttaagctaatcccaaatcctcaaaataggatttagaaaagccaaagacactgctgagggcgattacaagttttggtcttttgaggagcagttggagatgaaagtctgtctgaagccgagagaatccttttccattgaaatggcattgaggtgtgcctcactggctgctgcttctgtctgtgccctgggttggccagcctttgtggagcacctcagccctccatcctggacctttgctccaacaacctgctcctcttccgccctcaaggctgacttgcatctccccagatgactgcctccatttctgtcttctgttagagacagaaaagcctgagaaaccgacagccattttggggggggggggtccggttcacacgctgcaacttagaaagcacactcaactggccatctgttataccctccccacctggtcccaaccatcactgtgtactactgagaagaaggcagccttagccacaccctcgagtgcccctgccgttctattgctcatacatcgattgatatccctgtttcaactttgaaaaaaaaaaatttttttttttttgtggtgtgtgcatgcctgctactgtacacctgtgggcgtcagaggtggtcctctgcaccctccggccagtaccgcatccagggtgagtcagatgatttcctgtggtttgggcctcaaggcttctcacctccagaggcttctagcctgctgccttgctttctctgtcgcactctagtacagcaggagttttcttcgcactccggagtgttgtcagctcctggggcatggacatttggctacttagagtgtgctgtgtaggttttcatttagagctgaacagagggatggatcttattaccccagcccttgagacactgaggcaggagagcttcctagtgagtccctgtttcaatatcttcactaatactgtgtcatactttgggactttctttcttcctttctttcttttgattttttttttttttatatgagtacagtgtacctgtcttcagacacacaccagaagagggcatcagatcctactacagaaggttgtgagccaccttgtggttgctgggaattgaactccggatctccggaagagaagtccgtataccaacttctgtattagtcagggttctctagagtcacagaacttatggacagtctctagatagtaaaggaatttattgatgacttacagtcggcagcccaattcccaacaatggttcagtcgcagctgtgaatggaagtccaaggatctagcagttacttagtctcacgcagcaagcaggcgaaggagcaagagctagagcttaactgctgagccatgtgtttcttgagtaaagggattacatgctcgttcgtctggtcaattctgcagccttaaaacttcttcagaatagggtgacattttgtcctcagtggggcggttttgagtaatctgtgagcagataggaacttgctggggtactgcacagaactctgggtagtgtggtactgtagatggctaggttctggggggggaaagagccatctatgtcacctaggaatagagtgaataacatttatataatcagaccagcccttgaggaggctgagatcttttcatggggcaccctagggtcacagtcccagctggtgtgactctgacaagtctgcctttctcactacagtcccaggacatgaaagccctgcagaaggagctagaacagtttgccaagctgctgaagcagaagaggatcaccttggggtacacccaggccgacgtggggctcaccctgggcgttctctttggtgggtctcccccagcatgttctgatctcacggctcttaatgtaggcgcaagggggtggggcatcttaggagctgcttctccacaggtaagggaggattagacgcttgtagcttgaactgtcagaggtgggggcttgggctcccttcttgctgcctcactcactctgtttgatcggcctttcaggaaaggtgttcagccagaccaccatctgtcgcttcgaggccttgcagctcagccttaagaacatgtgtaagctgcggcccctgctggagaagtgggtggaggaagccgacaacaatgagaaccttcaggaggtgaggagtggcaggatgtgtgcaatgtctgccaggcacagtcccttctgctgcttccattcctggcttgaaactcctccctctccaaccggagctcgcaggagaagttctgtgtccttattctgctgctatgaattggaatccagagccttaacatttgctaatcaatcaggctctctccttctgagtcaccctctgcccccaccagcctgacaatggtccctccccagaaccccgtctagtgctggtgaaggctcagacctaggtctaccagccccttccagagcccctttcagtaacccctggctctggggccacatccagtcaatgctcccttagcacaatcccttagcggtttgttcttcagtcccatctcaaggtggggctgttgccaagtcaaatactaaagttgctcttgtcgcccccatcttcccctgcccagatatgcaaatcggagaccctggtgcaggcccggaagagaaagcgaactagcattgagaaccgtgtgaggtggagtctggagaccatgtttctgaagtgcccgaagccctccctacagcagatcactcacatcgccaatcagcttgggctagagaaggatgtgagtgccaagatcctgccctgtggtacctggatgtttccctgttcccattccccaccccccccacccccccacccccaccgccgccaccgctgactgcagcatcccagagcttatgatctgatgtccatctctgtgcccatcctaggtggttcgagtatggttctgtaaccggcgccagaagggcaaaagatcaagtattgagtattcccaacgagaagagtatgaggctacagggacacctttcccagggggggctgtatcctttcctctgcccccaggtccccactttggcaccccaggctatggaagcccccacttcaccacactctactcagtcccttttcctgagggcgaggcctttccctctgttcccgtcactgctctgggctctcccatgcattcaaactgaggcaccagccctccctggggatgctgtgagccaaggcaagggaggtagacaagagaacctggagctttggggttaaattcttttactgaggagggattaaaagcacaacaggggtggggggtgggatggggaaagaagctcagtgatgctgttgatcaggagcctggcctgtctgtcactcatcattttgttcttaaataaagactgggacacacagtagatagctgaattttgttttccttcagttcctagagagcctgcggttggagaaagccagtaatggattctcaaaccccaggtgatcttcaaaacaggcgccattgaaaccattggagttccacaaaatgcccagggatagttggggttggagcccaacctatagaggaaggcattgcatattcgccatcctagaggcggtaagtctctgctagctgatggacatcacctcatagccattgtctggcagccgccttctttcctcttgtcactctgggagttctggtgggcttatactttaaaaaaaagagtttttttgggggggttaagatttattttatttatatgggtacactgtagctgtcttctagacacaccagaagagggcatgggatcccattacagatggttgtgagccaccatgtggttgctgggaattgaactcaggacctctggaagagcagtcagtgctcttaaccgctgagccatctctccagccctcaaactcttttttttcttttccttcaagatgagttctgtgtagtcctggcggaccaggttggcctcagatcagcctgcctctgcctccgcagtgctgagattaa

SEQ ID NO: 32 - DNA, 4668 bp, Mouse
agacgtgccccacgtcccctgcgtgcagcgactacgaccgagagccgcgccagtggctggtgtcccgccgagagttcctcagagcaggcggggacaactcccagacggctggggctccagctgcgggcgcggaggttggcctcgctcgcaggggctggacccagccggggtgggaggatggaggaggggcgggcgggctcttcggtgagtggggcggggcctctgggtccacgtgactcctaggggctggaagaaaaacagagcctgtctgctccagagtctcattatattcaaatattcattttaggagccattccgtagtgccattcggagcgacgcactgccgcagcttctctgagcctttccagcaagtttgttcaagattggctcccaagaatcatggactgttattatatgccttgttttctgtcagtgagtagacacctcttctttccccttcttgggatttcactctgtcctcccatccctgaccactgtctgtccctcccgtcggacttccatttcagtgcccgcgccctactctcaggcagcgctatggttctctttctggtccctgcaaggccagacactcgaaatgtacgggctccttttaaagcgctcccactgttttctctgatccgctgcgttgcaagaaagagggagcgcgagggaccaaatagatgaaaggtcctcaggttggggctgtcccttgagggctaaccactcccttcccagtcccgtcccactagcctgggaaggccagttccttgcctcataaaaaaaaaaaaaaaaaaaccaaaaaaaacaaaaccatgttcgttttggaatcacccctaccgttccctgggaacaagactctttagtgagcattttcaacgcagcgactacaatgaaataaatcacaaagtcactggggcagccccctgactccttttcccagtcactggaccttgctgcccggtccaagccctgccggcacagctctgttctcccctcctcctgttcttaaccagctggaagttgtggaaattgggctggagggcggaggaagggcgggggtggggggggggtggagaaggtgggggggaggctgaaggtccgaagtgaagagcgatggcattttaattctccctcccccacccccctttacctcctcaatgttaactgtttatccttgaagaagccacgctgagatcatggctcagatagccgttgggacaggatggaggctatctgatttggggttatttgagtgtaaacaagttagaccaagtaattacagggcgattcttactttcgggccgtgcatggctgcagctggtgtgtgtgtgtgtagggtgtgagggagaaaacacaaacttgatctttcggacctgttttacatcttgaccgtcggttgctacccctatatgcatatgcagagacatctctatttctcgctattgatcggtgtttatttattctttaaccttccaccccaaccccctccccagagacaccatgattcctggtaaccgaatgctgatggtcgttttattatgccaagtcctgctaggaggcgcgagccatgctagtttgatacctgagaccgggaagaaaaaagtcgccgagattcagggccacgcgggaggacgccgctcagggcagagccatgagctcctgcgggacttcgaggcgacacttctacagatgtttgggctgcgccgccgtccgcagcctagcaagagcgccgtcattccggattacatgagggatctttaccggctccagtctggggaggaggaggaggaagagcagagccagggaaccgggcttgagtacccggagcgtcccgccagccgagccaacactgtgaggagtttccatcacgaaggtcagtttgtgctcttagtcctggcggtgtagggtggggtagagcgccggggcagagggtggggggtgggcagctggcagggcaagctgaaggggttgtggaagcccccggggaagaagagttcatgttacatcaaagctccgagtcctggagactgtggaacagggcctcttaccttcaactttccagagctgcctctgagggtactttctggagaccaagtagtggtggtgatgggggagggggttacgttgggagaagcggactgacagcactcagacttctgctagccccagcggtgtgctttagctatatcaaagccagggtttctgcccgttttgttcaaagcacctactgaatttaatattacagctgtgtgtttgtcaggtttattcaataggggccttgtaatacgatctgaatgtttcctagcggatgtttcttttccaaagtaaatctgagttattaatcctccagcatcattaccgtgttggaatttattttcccttctgtaacatgatcaacaaggcgtgctctgtgtttctaggatcgctggggaaatgtttggtaacatactcaaaagtggagagggagagagggtggcccctctttttctttacaaccacttgtaaagaaaactgtacacaaagccaagagggggctttaaaaggggagtccaagggtggtggagtaaaagagttgacacatggaaattattaggcatataaaggaggttgggagatactttctgtctttggtgtttgacaaatgtgagctaagttttgctggtttgctagctgctccacaactctactccttcaaattaaaaggcacagtaatttcctccccttaggtttctactatataagcagaattcaaccaattctgctattttttgtttttgtttcttgtttttgttttgtttgtttgtttgtttttttttttttttttgtctcagaaaagctcatgggccttttcttttcccctttcaactgtgcctagaacatctggagaacatcccagggaccagtgagagctctgcttttcgtttcctcttcaacctcagcagcatcccagagaatgaggtgatctcctcggcagagctccggctctttcgggagcaggtggaccagggccctgactgggaacagggcttccaccgtataaacatttatgaggttatgaagcccccagcagaaatggttcctggacacctcatcacacgactactggacaccagactagtccatcacaatgtgacacggtgggaaactttcgatgtgagccctgcagtccttcgctggacccgggaaaagcaacccaattatgggctggccattgaggtgactcacctccaccagacacggacccaccagggccagcacgtcagaatcagccgatcgttacctcaagggagtggagattgggcccaactccggcccctcctggtcacttttggccatgatggccggggccataccttgacccgcagaagggccaaacgtagtcccaagcatcacccacagcggtccaggaagaagaataagaactgccgtcgccattcactatacgtggacttcagtgacgtgggctggaatgattggattgtggccccacccggctaccaggccttctactgccacggggactgtccctttccactggctgatcacctcaactcaaccaaccatgccattgtgcagaccctagtcaactctgttaattctagtatccctaaggcctgttgtgtccccactgaactgagtgccatttccatgttgtacctggatgagtatgacaaggtggtgttgaaaaattatcaggagatggtggtagaggggtgtggatgccgctgagatcaggcagtccagagggcggacacacacacacacacacacacacacacacacacacacacacacacacacacgttcccattcaaccacctacacataccacacaaactgcttccctatagctggacttttatcttaaaaaaaaaaaaaaaaaaagaaagaaagaaagaaaaaaaatgaaagacagaaaagaaaaaaaaaaaccctaaacaactcaccttgaccttatttatgactttacgtgcaaatgttttgaccatattgatcatatattttgacaaatatatttataactacatattaaaagaaaataaaatgagtcattattttaaagataaactaagacctttctatcttatttcctcttccatactcttgaatgtcgagatggggctgtgggtagactgaaagtcagaggtggcaactggaggtgttatcagctgtgggggcaggagccagtgatggcagagagatggcaatggccaggatggattggtctccattcttatttaatgttaacaaggaagcagcaccctctgccatctggaggacacgtgccctgcagaaacagtggatgaaaggagtagatcaggtgaaagaatttggtttgggacttccgggctcatcttagctctgctcacctgttgtggagtggcagcgcctcagccctgtggaggaagagatctcgactctaggagactcattcccacctttggcttcatgataccccagagtgtcttcagtcctggcaggcatctttctcttcttgaaccaaatccaacctgtacatacacagtgtcctttcaagcagggctttgtttttactgtttctgcgccccctcccagacagggtcccactatgtagccttggctgtcttagagctcagtatgtagcccaggctggcctcaaactcacagagatctgcctacttctgcctc

SEQ ID NO: 33 - DNA, 25638 bp, Mouse
attaagcctggaagagaaggtgacccttacccagttgttcaactcacccttcagattaaaaataactgaggtaagggcctgggtaggggaggtggtgtgagacgctcctgtctctcctctatctgcccatcggccctttggggaggaggaatgtgcccaaggactaaaaaaaggccatggagccagaggggcgagggcaacagacctttcatgggcaaaccttggggccctgctgtcctcctgtcacctccagagccaagggatcaaaggaggaggagccaggacaggagggaagtgggagggagggtcccagcagaggactccaaatttaggcagcaggcatatgggatgggatataaaggggctggagcactgagagctgtcagacagagatttctccaacccaggtaagagggagtttcgggtgggggctcttcacccacaccagacctctccccacctagaaggaaactgcctttcctggaagtggggttcaggccggtcagagatctgacagggtggccttccaccagcctgggaagttctcagtggcaggtttccacaagaaacactggatgccccttcccttacgctgtctcctccatcttcctcctggggatgctcctccccgtcttggtttatcttggctcttcgtcttcagcaagatttgccctgtgctgtccactccatctttctctactgtctccgtgccttgccttgccttcttgcgtgtccttcctttccacccatttctcacttcaccttttctccccttctcatttgtattcatccttccttccttccttccttccttccttccttccttccttccttccttcctttctcccttccttccttccttccttccttccttccttccttccttccttccttccttccttccttccttccttccttccttcctgtgtcagagtgctgagaatcacacctggggttcccacccttatgtaaacaatcttccagtgagccacagcttcagtgctgctgggtgctctcttaccttcctcaccccctggcttgtcctgttccatcctggtcaggatctctggattggtctcccagcctctgctactcctcttcctgcctgttcctctctccgtccagctgcgccactgtggtgcctcgttccagctgtggtccacattcttcaggattctctgaaaagttaaccaggtgagaatgtttcccctgtagacagcagatcacgattctcccggaagtcaggcttccagccctctctttctctgcccagctgcccggcactcttagcaaacctcaggcacccttaccccacatagacctctgacagagaagcaggcactttacatagagtcctggtgggagagccataggctacggtgtaaaagaggcagggaagtggtggtgtaggaaagtcaggacttcacatagaagcctagcccacaccagaaatgacagacagatccctcctatctcccccataagagtttgagtgacagaatgacggacgcccagatggctgacttcggggcagcagcccagtacctccgaaagtcagagaaggaacgcctagaggcccagacccggccctttgacatccgcacggagtgcttcgtgcctgatgacaaggaggagtatgttaaggccaaggtcgtgtcccgggaagggggcaaagtcactgcggaaactgaaaacggaaaggtacgtgcaatggtggcaagacaggggagggcggcttagggaaaggggttggagcagagcctcctgtagcaggagctgaggagcctgagaagaggtggggatgccaagatatgttccctagagaaccttctcagggaaacccaagcaggtgcaccagggtgtcacccaagggatgctcgcttgccagaaagacgctgtcttcctcctcagagaggtctttatacaaaggcaccagcatagcattaaaggcagttcccctttctagcacttgcatccctcctgtctgtgcctcagtttcccccaagagttcactttctcaaattcccttctcctaaaccaagagcaaattcagatccagatgaacaaatagagcagaaatttttgagctgggatccgattcctgaggccagtgatagacacaggaacctctgttccctaggtgctcagtctagccgtgagaaccacccaccgctcaccagtagtgctcagagttgtgttcctcacagatttgctgcctggatgttgcttccccaggatgtgtgcattgatagtcacaacccacaaaggattataatctatcccagctcagtgagctctggtcactatgaaggcacaacatttaactgctaagagccaccacctcttccaccattaaaacaaaacaaaacaaaaaaacaaaaacaaaaaaacaaaaaacaaaaaccacttgaattccagtgggcagaagctattggcatcaagacatagaacactgacaccaatcgacccccaattttgatggataaggagttcagggttggggttgctgcctgtcccacagggaaaaggctttcctggagcaacagtgcttgtgagaactatgttcaggagacaggcccagaggcatggcacagcgtacatggaatctagagctgctagtccccagctatgccttggtctgtttaacacatgggggcagaaaagagatgatcactggacagggtcaggagctggcatggggaaaggaactctagaacatctctagagctcgggcaggaaaaatacctgggaactgagtcctaggggatttaggggcaggaaactgaaacctttgtcagccaagaactaggggagcgaggccaagccaaggactaggtaagggcataaggctggtaaaggagatctgacaagagcccatgggaaggtcttcatccatcctatcacccactctgcttctccagacggtgaccataaaggaggaccaggtgatgcagcagaacccacccaagttcgacaagatcgaggacatggccatgctgaccttcctgcacgagccggctgtgctgtacaacctcaaggagcgctacgcggcctggatgatctatgtgagttgatgctacacactgcaggaactcggtagaggcctatacgggtcagtggactcgaaaagagggggttaaaaagcaccccaaagtcccagtgtcctctcatccagtctgcctggttcatcctagcagaatgaagggagccagctcaagtggccaggggtgcctctgactgccaccactgccttgcttagtctccccttaacagccacatgttggccctgtcttctaccccagacctactcaggcctcttctgcgtcaccgtcaacccctataagtggctgcctgtgtacaatgcggaagtggtggccgcctaccggggcaagaagaggagcgaggcccctcctcacatcttctccatctctgacaacgcctatcagtacatgctgacaggtaagcctggtgctcagacctgggtcccctcaacctgaattctcacctggactcgcatccctcaacccattgcctctcctcctctctcttccagatcgggagaatcagtccatcctcatcacgtgagcaagcactaaccctccacagggggttcgggtgggatggccaggctgaccactgggtacagctgtgaaggagagtcttcaggctataattgtaagggagagaggactgggctctttttagaagccaaagctcatgccgtgctgggctctggtgccctaggctaggaaaggacaggtgtggagcatgttgtatgaacaatagtggaagtcctgggctctgatcgccgccccttgttgcctcaagcggagaatccggagcggggaagactgtgaacacaaaacgtgtcatccagtactttgccagcattgcagccataggggaccgtagcaagaaggaaaatcctaatgcaaacaaggtgagtgtgggtcataggctcagctgaggcattgcagggagaagagcagggcttgggagggtcggtgcagacaatctttctggcgggacacacatgctctgagacttgtgtggggcccaaggactagtcagctgtgcatacagcctccccctaaccctgaagatttgcttaggctcccagctaaccagaaccttctagaggtgaatggaagataaacccccacatctctgctcctttcacagggcaccctggaggaccagattatccaggctaaccccgctctggaggccttcggcaacgccaagactgtccggaatgacaactcctcccgctttgtgagtgaccttggatcactactataaatgacctcaaatgtgtcaagaaaatggagttctattttgtcaagagttgatagactttgttgattatattgcacctgcattttgagtatcattaagtatatatatatgcaggcatacacagataaacagacacacaggcacacacacacacacacagattgagagagagagagagagagagagagagagagagagaaagagatattggagtcatgtttgaggggacaaaggcctgaatttctacatactgagcgagtcagcacctcccaagtcccagcgaacacagaggagatgaagggggatgaggtgagagccacaaaccagaggcctctgacatagactaagcctggtagctgttttcccctctgcttcttgctgatatctgggtgtgaacagccttttcttagttttactgacactaaactgtgacaccggataggccttttacattctagagccatcaggacactctgggttgggctaaagtcctgtttttgattccgtacttctggcgagagccttcactctggtctacctacaggggaaattcatcaggatccactttggagctactggaaagctggcttctgcagacatagagacctgtgagtaccgccatgatgcttgctccctccccttgggcagccccatctcctcactctgacttctgcctagatctctgcctacttcatggctttaatattctttattgaaactagcctcttcctgggttccatgaccgccatgtgggagcctctggctctgctccctgttcttttgctaactcacctctctcctctcacccaccatcctcccatctccattcctcagaccttctggagaagtcccgggtgatcttccagctaaaggctgagaggaactaccacatcttctaccagatcctgtccaacaagaagccggagctgctgggtaacctgacctgaccactgcccttgctgttcccagaacctacccatggggctcctcccctggctcagtccaacctcgttgctccctcttccctctgctccactcttcctcctccctcctgctagctgctctgcacctctcttgatgccctccctgtcaagtacctcgctcctcattttgtgtcttccctctcttctccgccatgtttactctccttcccctttacatcttctcttcacaggcttttcccacatggcatgctccttcttcttcttcacgggggccttggggcttctttcctggatccccctgtgccttcactactctggccttcactgactgttctctctatctcctccctgtcctatctccctccactctttttccattctccctccttccctttctttacctccttccctccccatccctgccctgccctccctgcttgaaacagacatgctgctggtcaccaacaacccatacgactacgccttcgtctctcagggagaggtgtccgtggcctccattgatgactctgaggagctcttggccactgatgtacgtgaggagcctggagatggccctgggggttccggagaactccggggtcaccttccacccatcctctccctctgtcacagagtgcctttgatgtgctgagcttcacggcagaggagaaggctggtgtctacaagctgacaggggccatcatgcactacggaaacatgaagttcaagcagaagcagcgggaggagcaggcggagcctgatggcacagaaggtgtgggggaggtgcactgttgaggaaaccctcaagtactgaagtcactggggactgagtcccttgtgctgtgcgcagcggttctttcaacaagtcttaagggattaggtcggcagcaaaattgtctggattacaatacagaaagtaggaggaaactgggagcaacatgagaagcagtggtcatcatcttcacctagggccaggccctgttcccgggcctcttcagctagatcccagtcaagcccctggaatactggaggaactgaggcttgtaggacagagagaaggggtgggggatgggtggatcaaggacatggcaaatagatccacagccacactaagcagaagttagctgggacaaagaaatggaggtactgaaaatgcttcccctctccttgtctatcagatgctgacaaatctgcctaccttatggggctgaactcagctgacctgctcaagggcctgtgtcaccctcgggtgaaggtggggaacgagtatgtcaccaaggggcagagtgtacagcaagtgtactattccatcggggcactggccaagtcagtgtacgagaagatgttcaactggatggtgacacgcatcaacgcaaccctggagaccaagcagccgcgccagtacttcataggtgtcctggacattgccggctttgagatcttcgatgtgagtctgggagccctggctgggacaccacatgtttctcacctacccactcagaccatcagtcacatgtggagggccagccatgggcaaggcacaggatagtagtggggacccattagagccaatcactgtccctgccctcaggagaagccctcccttccctgccatgacctgggagggaaccagccatgcctgtgccaggttcgggcagatgtgtggcacagtcctaggctgacccaccctgctggtcactcagaccctcagtcagtctgcctgactggctgcctcacccctgcagttcaacagctttgagcagctgtgcatcaacttcaccaatgagaagctgcagcagttcttcaaccaccacatgttcgtgctggagcaggaggagtacaagaaggagggcattgagtgggagtttatcgacttcggcatggacctgcaggcctgcatcgacctcatcgagaaggtgagccctgcctccaccatctaagctcccttctctgccaaccccaaaacagtcattccatctcttctaccctcaggagaccagactccccagactcccaaattgctccccagtcccagcttctcgcactgtgaggtcacaagcacccacagctgctctcttctcacctcaaaccttgagtcttgttccattctgtgatggtcacctcccagtgactcctgacccttctctaccacatgagaaacatcaatcatggaaaaatcctggactcaaacaggaagtgtttgttttgtatccttcctgtttgctgagaaataaccaattctcagcccatctccacaggagaggaatggtgtccctgtggcgtaatgatggcctgcagtgtgccttgccttttgctgcaggccagaacccaagtgtctgacctgcatgcagtcagtcaccgttcaccgaaaagggaccttcccataagctgagtcactacttgacttctagacccaagttctcatctccctgacaccacagaatccctaaggtttggggaaggaatatatgcatcttcctgggggggagggagagggggaaatggtctccagctttaccaaatcctcaaaagaattctagccctgagaaaaactaagaattccatactctgaaggcaaaagtgcttttcagaactaggatccacccagccaacccttaactggcggctgacatcagccaagttctgtggacatgcatctgtccctcgcctgaaaaagaaggatttttccctctgcaggctttaaagggagtgactaggaacacatagctacttggctactggggcaaaagaaaaaaatatatggggtaactccagatgtaactggatttaaggtaactaagaatattgtcatcctatcttgggccaagaggttctgcccaggcaacctttgacccttcagcagtgcaggtctgtagagccttcttgtcagagtgtgggagtcctggaagttaggaatgtaactactcatcatttctctccttgctctatgctgtcagcccatgggcatcatgtccatcctcgaggaggagtgcatgttccccaaggcctcagacatgaccttcaaggccaagctgtatgacaaccacctgggcaaatccaacaacttccagaagcctcgcaatgtcaaggggaagcaggaagcccacttctccttggtccactatgctggcaccgtggactacaacattatgggctggctggaaaagaacaaggacccactcaatgagacggtggtgggtttgtaccagaagtcctccctcaagctcatggctacactcttctctacctatgcttctgctgataccggtaaaggggcatcccctacagtgggctggggggttcctcaagtgcaggggggtccaggggcagcaggagagcacaacatagtgcacctgcactcccccacacctctccctaccttgtgtcatggatatggacacacatgtctgtcttctgaagtctgaaaacaactggaggccaagaagggaggcacacactctactgtcaggtgcccaacacagaaacatgcgtaaaggagtttttaatgtgtgttgggaagattgctgaacaatggatagggcagatgagcctccagttcagagaatgaagaaaatgggcgtggttagaaatgactagggtaaagtataaagagagtagataacgggaagagtggccgcaggatttggagatggaaggtcagggcatgggtagtgttttcacacctgcgggtaggctagcttagaggctgtgtctgagccagcacccttcccagcttttagaggaagttacttccaccgtcatggaaaatagacttggaaaattgttggcccaaagtcacacagccccggaagaccagagccttggccctgcctaagaatgcctgtgtttttaaggtcttgttctttggtccttcccatgtcattaggtgacagtggtaaaggcaaaggaggcaagaagaaaggctcatccttccaaacagtgtctgctctccaccgggtaagacgggccagagattccagagcacctgtagtgggtaagccagagcctctgggctgcagctctcgaccgtgaagctctgtgtatgggatggcaagaagctggagttacatgatcgtctgggggtatttaacaatatgagaccgaactcaccccacttccgtttggtttatgagctagcctttaacggatggtctgagccatctctccagaccaaccccgcttccttttgatggttctggtgatggagtatctgggaccttgcactcagagacccaagggaaggttcatatggcccctgactctcctctcccctcttctccaggaaaatctgaacaagctgatgacaaacctgaagaccacccaccctcactttgtgcgctgcatcattcccaacgagcgaaaggctccaggtgagccacagggaaggttttagtcaggggtgctgcctggcacccacttacccagaggctgacctccatctcccctgctgccccaggggtgatggacaaccccctggtcatgcaccagctgcgatgcaatggcgtgctggagggtatccgcatctgcaggaagggcttccccaaccgcattctctatggggacttccggcagaggtaaggggtgcctcagggctcagggagccaggggtgggctccctttgtgggattgtggtggggtctatggtggccctggaattctataggcagagcagaccccacagaatgcaaatgactctgagaacttccctcccaaggtatcgcatcctgaacccagcagccatccctgaggggcaattcattgatagcaggaaaggggctgagaaactgctgggctccctggacattgaccacaaccaatacaagtttggccacaccaaggtgagtctagagctctaaataatggctgtgtagcaggtagccatgttgagtgatacagctaagactgggaggcagactcgcacaggctccacccctctccttttccacgcccacagtcagacctggaatgctggagtgataggtccctgggagcttactgaacattcttccaccctcctctaccttggccaccctttgttgatgctgcgccccgccttggttctaccaccttgcccttaggtgttcttcaaggcgggcctgctggggctgctcgaggagatgcgagatgagaggctgagccgtatcatcaccagaatccaggcccaggcccgagggcagctcatgcgcattgagttcaagaagatagtggaacgcaggtgaggcgggcacggagggccagtgtctgagaggacggccagcagtgtggaatagttacagggatctgcattcagaccctggctccattgattgctgtgatgtggacaagtgagtctactgcagtagatttcattttgacctattttgaaaagactccatgacactttaaaacaccagatgaatttaagaaggctggcctgttgtttatagatgtataaattagtataggattttgagaagctttttattctctttcttaatgtacctagttttttttttaattattagattcatttatgtattggggtaatgctgtatcacatatatgaaggtcagagaacaatccacagagttggttctctcgattgattgattgattgattgattgattgattgattgattgactgactgagaaaaggtttctctgtgtagccctggttgtccttgaactctctctgtagagaggctggcctcaaacgcagagatctgcctacctttgtatccaccataatgctgaccttaaaggcatatactgctctctctctctctctctctctctctctctctctctctctctctctctctctctctctctctctctctctgctattgttcactgttgttctactatgtgggtccaagggataaactgaggtcatcagacagcttctacctgccgaaccacctcaaaggctcttattctctctgtgtatataagccacctcacatttatttgtgtcttttgtgtgtgcatgtgtatatggtacgtgtgcacatgtgtccgtgcatgaagcagggtgcatgtggaggtcagaggacagcatgcaggaccagatctctgctcctaccatgttcagtcacagggaccagactctggctgtgatgatgtttgacagtgagtgcctttgcctgctgagccatcttgccagcctgttctcttctttaaagttgaactatcacatacttttaattttgttaggtttttgacaaattcatacaatactcagtgatcatattgaccacattgccctccactcctgctggccccttcttattcctaaccaatcccctctgcttctgtgtctttattttttatcatcacatactgtcctttccatttctgaatatagtctcccagagaaaccacttcacatggtacaccaggagacaaaagaaaagaaaaaaaaatctatcttcatggcagtcttaatcttaagagcagagatctagccgggcgtggtgtcgcatgcctttaatcccagcactcaggaggcagaggcaggtggatttctgagttcgaggccagtctggtctacagagtgagttccaggacagccagggctacacaaagaaaccctgtctggaaaaaaaaaaaaaaaaaaaaaaaagagcagagacctagaaaggacctcaacttccatctaaaggagtgtggctaaagagtatcccagccatttggtgaaatactatctaactgtgaaaatgtctatgctacagcgacatggtataaaagcaattcatacaagcagacatacagtatgacacagtatttatctatgaagctcagaaatcatgacaacagaagttcattgtttaaagtgacctttgcatattgtctaaaacacttttttttttaaaaaaaagaagtaaaaaaaattgaggaaccaaggaaatggctcaggtagggtttgctgtgcaaacatgaactcttatgctccttctccagcagccacatgaaaagctgagtgtagctgcccaatccataaccccagccctgtggggcagagagagcagggtcagtagagctccctgcataccagcctaacggaaacagcaagccccaggttcagtgccttaaggcagagaacgccagaaggagacagctcatgtcctcctctggtctctaggcacacatgtacccatgtatactcacatgtgtgtgcctacataaaacacacgcacaagcacaaattaaaaaaagaaaaactgagatgggtgtctcattacatatctaggcagggcaggcttggagcttactatgtagaccaggctaacctcgaaccacagctgacaagcacaaaaaatctacactaccacaccctgccaaaaaatagtaataatttttaagtaagaaaattaaaaacaagtttaatagcagtggctgcttctagttgagggccagagaaggtggaaaggagcccacttgcagctcagtagttgaatgctccatctcctgctcagctggtgggctcccaagcagttattttgtagcattctgagatgtaaaatgctacatagtctgtatttgaaggtatcccaaaaatgaacactgaacaggtagacctctcagtggcttctgttactattgctgccccagtagaggaatgcataccatacttttgttgaaatcataaggagtgaggctacaatgccccttgtcctttgtgcctacaaacttgctcagacagaggaggccagggcaactggtcccatgcctgaggagacttctttctagagttcttcctgattgcactctttctggtcagggatgccctgctggttatccagtggaacattcgggccttcatgggggtcaagaattggccatggatgaagctctacttcaagatcaaaccgctgctgaagagcgcagagacggagaaggagatggccaacatgaaggaggagtttgggcgagtcaaagatgcactggagaagtctgaggctcgccgcaaggagctggaggagaagatggtgtccctgctgcaggagaagaatgacctacagctccaagtgcaggcggtgaggccacatgactttctcttctttctccctctctgtctcctggattgttgcccatctcatctccagagtctgggaatccagaagctccacccctttacaagacccgcatcttccccctctttaatctctttaatcgttgacttcttccattccttgcccccaggaacaagacaacctcaatgatgcagaggagcgctgtgaccagctgatcaagaacaagatccagctggaggccaaggtgaaggagatgaccgagaggctggaggacgaggaggagatgaacgccgagctcactgccaagaagcgcaagctggaagatgagtgctcagagctcaagaaggatattgatgacctggagctgacgctggccaaggtggaaaaggaaaagcatgcaacagagaacaaggtgaggccggttccctcgggttcagcctaggtctccagaagatttccagaccagagtatcggcctagttggtagcatctatacatgtctccacaatgacatcctttgatcctaaaggcaaggtggatttatttatttatttttattcttctttggcaggttaaaaacctaacagaggagatggctgggctggatgaaatcattgccaagctgaccaaagagaagaaagctctgcaagaagcccaccagcaagccctcgatgacctgcaggctgaagaagacaaggtcaacacgctgaccaagtccaaagtcaagctggagcagcaggtggatgatgtaagtgataagagccatgttccgcctctctcagatcaagactctgtagccaacgcctatagagaaggagtttccctctgcatctaactcctatgaccccaggagcttctctgttctctgggattcctcatcaggcaaatctctggagtaccaaccccgatggacttcaagtttaaggcgtacactgtgaattccagtctttccagcatgtattcattttattctctctgccagctggagggatccctggagcaggagaagaaagtgcgcatggacctagagcgagccaagcggaagctggagggagacctgaagctgacccaggagagcatcatggacctggagaatgacaagcttcagctggaagaaaagctcaagaagtatggcccgtggtgggcaggaggggctgacaagggataggtttctggcctggtaaccgtggcgcaggatgctgtgtttctactggcttggcttccctggacacactgaaagtgagggcagtcagggctcaacccctttgctgtctgggccagggtttgggggctggttctggcatagagcaataagacgggcccagaggaagggcgaccctcagtttcacgccccttctcctctaggaaagagttcgacatcagtcagcagaacagtaaaattgaggacgagcaggccctggctcttcagctgcagaagaaactgaaggaaaaccaggtgacctgcttccctgggtggttgaagggaactcagagcctggagactgtgtgtgtgtgtatgtggggggggggggtatttaaggttctagactatgtctggaactccaggcagccgagtgcccaagcactcctaaatacaggaacactagctttcccgttattgagcaagaatatgtcatcttcttagcaaaactgatttgagggcgaatcatacctactaataaggcatctcttccccaagatgcactctgcctgttgaactttctcttctggaacaactcggaggactcagttcttctccaatccgctctattctctctctctgcatagggatgagggaaacgctcacaaatccgcgtcccagggactgccctgttcacaatccttgaatactaacctcagcctctaacacaggctgagggccacaggcatccctgcatacagttaactcctccttgtggagtaagtcaccctggttccttggcactcgctattctcacctgcacaatgacagtaaggctgtaactaggcttaccagcactcatgtgtggtttgttcccatcttggctccatcttctttattttacccagaatactgagccatcccctgcatcttctgccataagtctgggcaagttctttggcctctaggagataataatgtcattattctcactgcgtctataggcccctccctcttctgtgtaggatctgtgcttcaagtcctaccttctccacgttgagagcagaggtgtaagtcccctctctcctacctcagggtctactctgtagttcattaaaattgtccattgcaccaaaaaaaaaagagagagagagagagaattccacaaactttccctatagagacaaaaggctaaaatggcaaatgtgcatactccagatttagtcaggaccaagtctaaggccacaccaatgaggtaggggtatgaagaagagggcatcttattgatacatagcttggcttggaaaggagcaatcaagctacatcctggacctaggatacctaaggaatccatgacatggggaatctaggtgattagacctcatggttagctcagataattgcagtaggatttggttgttcttgaggcagctttgctacaaatgttagtttaaaaaaacaaaaaacaaaaaaaaaaccaaaaaaacaaaaaaacaaacaaaaaaaaccgagtgctcatttccttgccttatagtcagtggatcagagtcaggtgaaactgttggctgtctgaggttcataatctcaggagatctcaggatcccgctccaaacacagatgctcaacacttaggctgcagatgctcaaactgaatctcagatgctttagggaaatcctccaaactttggcttcggccaattttctattctagggtgtttagcaatgtcccttgcttctatagcatcctccacacagtttaaaatgtctccagccatcaccagctatacctagtagctgaaaacccgtgctagaggtttagtgcgcatgggagccttttagagccctggagcacgggcctcaagggaggggtccaggaagcaggtctgatcctttgtatccctggctaggcacgcatcgaggagctggaggaggagctggaggcagagcgcacagcccgggctaaggtggagaagctgcgctctgacctgtcccgggagctggaggagatcagtgagaggctggaggaggcaggcggggccacatccgtgcagatagagatgaataagaagcgcgaggccgagttccagaagatgcggcgggacctggaggaggccacgctgcagcacgaggccacggcggcggccctgcgcaagaagcatgctgacagcgtggcggagctgggcgagcagatcgacaacctccagcgggtgaagcagaagctggagaaagagaagagcgagttcaagctggagctggatgacgtcacctccaacatggagcagatcatcaaggccaaggtgggccctctcagcagctcccctcctccctgccagtcgtggccctttccacattcacctttcctctgctcattaatgcctgcaggccaacctggagaaagtgtcccggacactggaggaccaggccaatgagtaccgcgtgaagctggaagaagcccagcgctccctcaatgacttcaccacacagcgagccaagctgcagacagagaacggtgggtgccccttaccgtcccctagcctgcccctggtagctttggtttcccccttccatggcccaagaacccttcattccacctgcaggggagttggctaggcaactggaagaaaaggaggcattgatttcccagctgacccgaggcaagctctcctacacccagcagatggaggacctcaagaggcaactggaggaggaaggcaaggtgaggcccatataatggcagtgggacagactccgtggcatcactggacacactgttacctccaagagtgcacctggatgccagaggtaacctggtaacctatctccctactaaatggtcagccctcctgatcatttaatgactccttattggtaaaggagagaggtaggcaaatggaaatcactcaaagacattgagactccacttcatgtgggtgaatctgggtcttgactgaagtaaatacgcataagaatctagagactggagggttgggtttgctccaatctccttgatgcccacctcttcccaggccaagaacgccctggcccacgcactgcaatcatcccggcatgactgtgacctgctgagggaacagtatgaagaagaaatggaggccaaggctgagctacagcgtgtcctgtccaaggccaactcagaggtggcccagtggaggaccaagtatgagacggatgccatacagaggacggaggagctggaggaagccaagtgagtccactgtggctgcccctggatttgccaagagaatggagcagagcgtctgctgtggagacaggcagagtagatgcaggaaagagctttggggtgggagaacagaggatggggagacctggtgagccatgggagtgtttggtagaaagcctgagtcctgcaacctgtaacgcctggctggcccttgcttacttcctttgacgggtgagcttttggcccgggttatacctgacactcacgtataagacgagcaaaaagcttgttggtcagaggagctatcatcatgcagcctgggcctgagggaagcgggtgggggtgcacagtcacacagatgtgatgtatgtgtgggagagtctgagcagcctgtgatggacgtctctgttctaggctccagtagccctcacatcctctaggctggggttccaacatcttagggaactgtggggagaagctgggtctttcccatcaacactcggaaggaggagatcatctcacgtccttgtggctccaagtacagtcacatacattcccctggacaggaagaagctggctcagaggctgcaggatgcagaggaggcagtggaggccgtcaacgccaagtgttcctccctggagaagaccaagcacaggctgcagaatgagatcgaggacctgatggtggacgtggagcgctccaatgccgccgccgcagccctggacaagaagcagaggaactttgacaaggtaggctcacggtggggctgcagacactgtgcatgctgctggtggggtcagtgccagctcaaggccacagcatgttccttggaggtgggggaggagggctgagtcaggagaggggcctgggcagttctggtcacagggcgctccttccctgcagatcctggctgagtggaagcagaagtatgaggagtcgcagtcagagctggagtcttcccagaaggaggcgcgctccctgagcacagagctcttcaagctcaagaacgcctatgaggagtctctggagcacctggagaccttcaagcgggagaacaagaacctccagggtgggcgagctgggggacagggaagagcctcagggaaagggaagtggggcaaggcatattgatctttctggtcctctgatcctcagaggagatctcagacctgactgaacagctgggagaaggggggaaaaacgtgcacgagctggagaagatccgcaaacagctggaggtggagaagctggagctgcagtcagccctggaggaggctgaggtaagggcctaactaggcactctccagcctgtcctgctgtatcctgtcttaccgcctcacagaagtcaccctgaccccaggacacaaatctattggctcccattcttagtagacagtcaccatgggtattcttagatacccaggaacaatgacttcccccaaagttgagttcctcacattgtacaatgccacagtctggtttgtaggacagaaggcttgcttgcttcctggctggaatcgggctatcataatatcagctcaaaccactgggtaggaacacaggctccagggtcaaatgacctaggtttgaaccctgtcttgagaccctctgtgtgccttgctgccctcatctataagatggaattaatgtataaacctcataggattatgtatatgataattatgaagactgagtaaaataacacagtcaagcacttactagccatgcttgctgcgcatttctaagaacttgggacagcccgggattagggctatagacacttcaacctttactgtgattttttgtttttagtcagatgggtcaggaactcctgctatgttagtcccaaaggcctgatgactgagaagtcttaattcggctgtagagatggctcaaccattaaaggctaggctcacaatgaaaaatataagagaagtcctaatcctctcctttatagaggaagatccaggagtcaggccctggaggctcagcactttctctcccacagtcgtctaggtacaggacctatcaccacagcaccttcctaggccacagtcctagtctgccatcctctccttctccatacccaacccaagtcagccttagttacccacctctgactcctctccgctttccaggcctccctggagcacgaggagggcaagatcctccgtgcccagctggagttcaaccagatcaaggcagagatcgaaaggaagctggcagagaaggatgaggagatggagcaggccaagcgcaaccacctgcggatggtggactccctgcagacctccctggatgcggagacacgcagccgcaatgaggccctgcgggtgaagaagaagatggagggcgacctcaacgagatggagatccagctcagccaggccaatagaatagcctcagaggcacagaaacacctgaagaattctcaagctcacttgaaggtaacaggagccaggcctctagaaagtggtaagtcagaatatgtatagtgcccagaaagatgataaaggtccacaacacaccactctgaatataacccaatcttgtctgctcttggaagctaagagggctgagactggttaatgcttgaataggagatagtaaatgacagggaataaatggactaacgtaagtatgagaaagtgggaactttctgcctcctgggtttgtaggcacgaggaacagtgcactctggaccagtcgagcctcaggacaagagagtaagataatgaaataggtgcttatcttcctgatgacaagaggtgacgtgtgccagactcaagatggaggtctgttggcatgaggtccaggccctttaccatcatactttccccacaggacacccagctccagctggatgatgctgtccatgccaatgacgacctgaaggagaacatcgccatcgtggaacggcgcaacaacctgctgcaggcggagctggaggagctgcgggctgtggtggagcagacggagcggtctcggaagctggcagagcaggagctgattgagaccagcgagcgggtgcagctgctgcactcgcaggtgacagagttggggaccctgtgcagaaacccactgagagtcagagaccgggataattttagaccaagtcaagcggcattgcaaagtatctcacttcttgggtcagctctcatctgttagtagcagctgggagaaccattgtctccagcaagaggaacagacttagaagctaagtgtgtcacggctgaatggtagtgcacctgtgagtcacaaatctgggaaccacagattgccttttgtcatctgataccctgatctacaagacagcctccaacttgatttgtaaagataggagctggggaatttaaaaatgtgtaactggggctggagagatgactcagcagttaagcatgtttactgttctttcacaggaccccaaaaatttggtccacagcacccaaatcaggtggctcacaatctcctacaactcaattccagaagatctgaggcctgtgacctctgtgggcacctgtactcacatgtacatattcactcatatgctcatgtgcatgcacacacactacatgtgcacacacagatatgtacatacacactcacacatacacatgtatacacacatatgcacacacacatacacacatgtacacacacatacatgcacatgcacacacatacatacacagatatgcacacacatacacatgtgcacacacatacacatacgtgcacatgcacacacatgcacgggtgggggaaagacatttttaagaagcagaactacatcctcttgccaggcaaacgatgggaagaacactgctatgcacattcccactgtatccagtcctactccagatgagtgtttgtgctgaactattgcagtgccttctgtggctttgttccataatttagcatattagaatattctgggggccaggcttctttaattttctattagtgttatttgtacatgtttacatgtgtgcacatgggtgcacaagacatgtgcacatatatgtgcacgtgtgaggaggccagaggttaacactgggtgtcttcctctgtcattgtccatcttatcttctgaggtgaactaactatctcactgaatgtggggctcaccagctggatgggtgggctgaccagtgagcttcagagttccatctgggtctgacctctggtcactgaggttacaggtgtgcaccatgacatcagcttcctcatgggttctggagatctgaactcagaccctcatgcttgagtggcaggtgattttctgcccaagccatgagccatctcctcagccttagatgactttttcatctttcccctctccctcttcctccttcccttcctcgtcccaatcttcctcctcttcctccttcccctcctcctcctgctcctcttcctccctctcctcctacccctcctcctcttcctcctctccctcttcctcttcttcatcctcttccaccttcttctttttcaacagcctcttttaattttttctgaaaaaaaaaaaactatggaactaagcaataaagtgtgcatttgatatttttttctagaacaccagcctcatcaaccagaagaagaagatggagtcagacctgacccaactccagacagaagtagaggaggcagtgcaggagtgtaggaacgcagaggagaaggccaagaaggccatcacagatgtgagtcccctcccctgcctacccactccagagcagcatctccctagcctgggcagtgagcccacgaggacctgagcagaccacatgctctcctctcccacacacaggccgcaatgatggctgaggagctgaagaaggagcaggacaccagcgcccacctggagcgcatgaagaagaacatggagcagaccatcaaggacttgcagcaccgtctggacgaggcagagcagatcgccctcaagggcggcaagaagcagctgcagaagctggaggcccgggtccgggagctggagaatgagctggaggctgagcagaagcgcaatgcagagtcggtgaagggcatgaggaagagcgagcggcgcatcaaggagctcacctaccaggttgggcagggctgatcaggatggagcaatggctttacaagcccacctgtgggcgcaaacagggctctggtgtgctgtgccatcactcactaatgccaggcaccacttcacaccagtacctttcgatgctagctgcagtttctctgatgggacacctaggccttagggcaccatcacagagtgtctgagaatgccatctgtatagtggagattggctattttcagtgtctgggaggagaagcctaaggggattggtgcattggtccacctaagagggtgtacaagaggcacatggtagagattgcagatctattgtggactaaggggcaatggtatcttagaacattaaatgacatggagacaggaatgaccaaggggcactggagccacagaccctgctgcccaaattctggctcaggagaaggtgccagaatattgggctatgttagatagaataatctagatggtgataacaccagctttctgtactattcctcttatgatcactttgaaccactggctgaaattgcccacgttactgcaagggaaactctatttaccaggcagaccctctgtctccatatgaccatagtaagaggttcctgggagtggcagggagtttgaagaaatggctcagtgattaagagcactcacggctctttcagtgaacccgggttcaattcccagcacccacatggcagctcacaactgtctgtgatcccagagtcagacaccctcacacagacatacatgcaggcaaaacaccaatgcaaataaaaataaacaaataaataaataaattgaagttcccagtggctctgagaacctcccctcatttccagcacccagacactcattaatttgtgattctctaactgaaaaatcctttcgtcctacgaccccttgacctgagccaccggagggtgaggcctctgaggcctggcgagaggaatagagtaagggaggagggactgataaccacaattgcttctctccccaaaactggctcctccatccctcccacccaccttcagacagaggaagacaagaagaacttaatgcggctgcaggacctggtggacaagctacagttgaaggtgaaggcctacaagcgccaggctgaggaggcggtgagttcagagtttcgtctccgtcttttatccgcacacctgctagtgagaaccagtgagcatttgccacagtggggctgagaccagagtctgctccaaccatcagctcagacatttattcttcaagtatgatcagaattgtatctagcaccctaaggtccaaagatcagtgctgttcctgccctacatctgtccactagttaattacagtccatataccataagactaaggaagagcattgagatgcaggacagcaaggggccaagagttggcgttgagcctggataggaacccagggtaaaagaagacacttgggtggacaggaacatgtgggtgtggtgtggatgagcccagatgtgcagaaaacccccaagtctgcaggcatctgtctgaggcacaactggaatagatgcagtggatgtggattctcagagcacgcagggcagcacaggttcattccgggcagtgggtagcgatgacgggtcttgaacactgagcacgtttgaggagagtgccaaacaggacatccctgggaaggctgttgcagaaactgagtgaggagtggctgagggacatggaccaggagaacctgagagcccatcccagagttctcctcacccgagtctcccctcccctttaccccctttaccggctcataggaggagcaggccaacaccaacctgtccaagttccgcaaggtgcagcacgagctggatgaggcggaggagagggcggacatcgccgagtcccaggtcaacaagctgcgggccaagagccgggacattggtgccaaggtgagttcctcccttggaactgctagtcacgcgctcatcaggatgcccctgcaagcatgatgctctgaacagctacgtgtgtatcccatgtgcatttagacatagaataggcatacatacaaccgaagggtcccacagacacctgtaacctgagagtccactctcccacttgaagtgggccccagatctgtgttctaaactacaagcactgatatcatgagacttcaagactgctgaggttcaacccctcccttcccaagggcattttattagagccactgaaatccctagaaattcctccccaggccatcgtacccactgacctcacatctcttactcctttctcagcagaagatgcacgacgaggaataacctctccagcagaccctcgctgtggccaatccacaataaacataaacgttcgactctgcctgcaccctgtccttcctaccaagcgtctctctggggtgggaattttggtggtccaggaggagggtggccacagcagggactgtcagagctgtaagatctgaagcaccccatggtctgtggaagccgagagagaagtgaggtgtcttgcctcaggcagcacagtacagccccagctccacttggtcgttgtgcaagtatagaaagggaaactttccaaacgtgggggaaacaaatccaggtgtgagggatggccaagcctcagatgggaggtggaggcaagaggcaggctcagctagaaggcaagtttaaagccagcctgggtagcgtgagagctcacctcaaagacaagaaaacaacaacccctcaatgagtccaaagaacagaggcactgaaagcgagccaagtcagatccagggggatggaagtttgctgacgagctggaagccaaccttccccagctcgtcctcttagctggcagaaattaaagttgccccgggccatgtgttctctccaagatgatctttccactggtacccaaagagtctctgcactgctggggatggatgcacaggaaactgctgtgggacacccaggaaaca

SEQ ID NO: 34 - DNA, 19164 bp, Mouse
tttccaattgagctccccacggtgcccttgtatctttttacagcccctaacaactcacaccagtaacacaattacctccagatatttataacaagaaattactttactattttctccacctcactcccaagaaccctctttttgagggaaagcccggaggactggacgccttgaggggcgctgtggcaagtcagtacttcagtgagtggagtcctcattttttcctttgggagttgcagagttgttggtttctttgcttggacctgatgtagctgggttgagagcctgggctttactgtctgggtttggggagagccacagaataaaagccattgtttggtgtctgtagactttgtctacacccccttcccgtttgtactttttaaaacagcgaggcgaggtggacagcttgtgtcacggtacaggaaaagaggaagatgtaaacaccaaaagcaaagttagctacaataaatgagatctagggtaaaaggctcaccacttgctcagtcaggaaggagctgagagatggactgtgggggtctgactggaaagcgtttttggggggtgggggggtggttaagtataaaggagtgcccagagagcttagctcctcaggaaagttgggagcttggtctgaggttcacccagacttcctaacctgaggcccaaggcaccaccaggtccttcccttcttcctctgcacactcccttccccagcgctgtctctcctcccctctctaatgttttagtttaaaccttctcctttccctggtacttggtagttttgcaaagtgagacccacaactcaattttccccattttcccaagcctagccaatacagccttttcctgagcatttaaatttcagtgggagaggccactggaagcttggggtgggtttggtgtttctaggcagaaggatctagcctcagatttactttaagtggactgcagacagacagccaactatgtgctgggccagtttgacacacctttctctgttttgtcttaggcagaagactttaaccaagggcggtgagcagatgtgtgagatcttctattctagaagtggacgtatatcccagttctcaggcaagttttatggtgctgttttgggcttcaaaatctgaaggactttttaaagaccgtagttcatgtgggaaaacaaatcaaaacccgatcattgtttctgtttcttccgatgaaagggttaactactaaaaaattcggggaattgtgaatgttggattattttattcgctgctcacaaattacattttgcatgcatatgggggcaagactatgtgacccttagatcgccccaagcggttgagtagctcaattctaagaaaagggggattctccagttcaggcaccaggttttcctcagcaggagtacaggcctacctgtgcaaagcctaggattaactccaagtttcttctaacagagccccgtattcgagccccgtgggatccggaggctgccaaccagctccagcatgcagaacagtaagtgtctcaggtctttctctggactgttgggctggaggcgtgcgggccgtgggttaggggagcgtactgagtcttgggtcttgaggagtccaagccactgggagagagggagggaggtggcctgggatctatccgggcaacactgagtgagcgccaagtagcccgcgaggaaaagctgagagactttttttgctctgctaggttctagaagggcagaggctggggcccttcaaaactactcgcccgagtttttgaagctgcggtagagaaaccccacccccccaccccaatcctgtaactcataccccctccccgcccctgcccgggctctgaccccagagagaggggctgggccgagcagggcggggcgaagcaaaggcttctcctgagaagagaaggaggcccctttgggcttggccaagactgtgcgattcctccgaccctgaggggtggggggggcttccctcccttagtcaatctctggccagctcctcccctccccaccctagctaccggcctagaagagaaggggagtggagcacccagggctggtaccctagtggggaagtaaacctcacagggtttactggaaaggagggtttcctggatctgggaagagagtggaagctgtgcgggtcaggaattggataaaccttgcactagcaagagcaactgagtgggttctggatgacccaggcccctggtgcctttgaccaggctcctttgtgcctctcttcttacctttgcccaggtcctttgggccccaacctttgtactcagccaatggttgctggtatgtgatagagttgagccactgaagctaggcctgggtaaaggtggagatctacactggctacaactatgcttgggagtatggagaggcttgggtcttctgtggttgtggactggcagaagcttagagagaccagcagctcttgatgccacaggacgaggggcgctaagatcaggaaagtgagcaaaggtgtatttgcggctgcatttgtgcagaacctgtcagatccgtaccctggagcttggactccttagccttaggttttcaggtgggccgaggcgctcagtcgcgaccgtttgccgctacactatggcctggctggcaggcccagaggggtacgggtcgcgggttggcctgtaggctttgtgccgctggttcccgggtgtgcgcgaggcgcggagcatccaaattgacaccatatgttttcgtattagaagctttgcggtcgaattctaggcgcataatcatcgccactgggcgagaacgccagcagtccccagggaagggacacaatgattgaggcttaacctctaaaggggaatttagagctatgtttcttcgctgccatttcgttgctggcagaggcgccctggccccgtgtctttcagaccagcaaatccgggctgcagctgtggaggtgctgggcacgttaattttgcaataagggataaggaaggtctatgaggccttgcacactctggcatccgtagactgggaattaccctggctttgcttttgaaaagtttctcttcatttctctgggaaggcctttctttttctgggaagctttcttttgcccagagatgagcctccatacctgcatggtaactgagatctagaaagccaaggtagatgataagagaaaatttaggagaaaccggaagcgcaaggtaggccttgccctgcttaagaagccctctcttgcaatgtgcaatgtccactcttgcactggcccgggacagccagagcccagatctctaaatgcctgtcacttttcatcgaattgaggccccgccccccctccgtgagctctaaccctcctccagccccaagcctcaagctaccctgaaaacgcagctcccctcgaaggggagccgagtgcagttcattctcgtctgagtgatctacaaatagggacggaaagggtcgttttatcacggtcccgtttgtcgtgacgatgcaatttcccggagcggagcactgtcacaaagtgacaaggctgccacaagcgccccgactgatcttttcaattagccttccatgcatgatccggagcgacttccgcctatttccagaattaagctcaaacttgacgtgcagctagttttattttaaagacaaatgtcagagaggctcatcatattcccccctcgtctatatttggagcttatttattgctaagaagcacaggctcctggagtcaatttatcaggaggctccaaggagaagagaggagaagagaggagacaagagaggagctgagaaccacatttccttgagagggcttctgtctagacacggggctgcaggttggagatgtccgaggaagtggaaagaggggactggttttttttttttttctattcctgtggtttccgaggagggtaaaatcatagacgcgctccttccctctcgccctagtctctacgacaagacaatgggatgaggttgtgagacaagagtggaaggaaggaccggtggcactgtgatgtggtctttttctttttctggtttgggtttctgttaatatttgtgtccttggctgagggggagggcggagttcagcagcggaagtaaagcgagtagtggcgggtgggaaggctccaggcttctgagcaccacttggggcaggcggatcactgtgtgagtgggatttccaactctatgcctgctgtggatgcacggattggggggtcactagcgacaaatttatctttctgacttttttctattccacacgcgtgcgcgcaccacacacacacacacacacacacacacacacacacacacacacacacacggtgctatgtgctgtgcacctctgccagagttaaatcaccatgctaaggttttataacgttctgtagagcagtgcaggacttgggatttgcagtgctgttccaacactgcagagacttctgtgtggactctgtggtgacactcagaggtgatgtagggagaagaatttaagagcttgacttttgccccttgtgggttccaagaagggctgggggtgcgtatgaagggggcaatagactcagggatgatggtattgggtggatatgttcctgtgtattctcccaggtctgacaacagtccagtgggcaggttcaaattgtatttgaggctgggctgcccagtatactgcatggctggtggttctgttattgggtgttttttttttgtttgtttgtttttttgtttttttgttttttaaaaccaggacctaattgctgaggttcacacaggttggcagggagctgaggttgcattgtggtcttttcttccttccttccttccttccttccttccttccttccttccttccttccttccttccttccttcctctcttcttcttcttcttcttcttcttcttcttcttcttcttcttcttcttcttcttcttcttcttcttcttcttcttcttctttcttctccttctttttcttcttcttcttcctcttcttcttctctgctctcctctcctcgtcctttcctcaggtcacagcggagtgaatcagcttggtggtgtctttgtcaacgggcggccactgccggactccacccggcagaagatcgtagagctagctcacagcggggcccggccgtgcgacatttcccgaattctgcaggtgatcctcccatggctgccctactcgccgctccctacccacccccaccccgccccctcgtcctgcggccctccactctaagcgtcctctcttcatttcttactgtaaacgctactaattactgactacaccaccctcaccaactccatccccaccacttcccttaccttccagctttcccctctccttccaccaaggtccctgtctcttccaacctcagtcagttatgtaagataattcatctgcgtaagaaaaagaatgtgagtgaattaaaaatatacttttttcatttggtaaagacattcattgtggtaacagtgtacaaactgtaatgagctgagttatataagctgggataatttcattcccctcttcccatcccgtgctaacctcagattttagagaattgtttgcatccatcacgcttgtgaagaatgtatatggattttcaaaggcaaatgttatccactcctaattcacatttgctcaactgggcaaaaatttaagggaaaaatcataaaaattccattattttccctttgttcttcacaacataatactactttaggcaaggtcagcacaaaaaaattaacctgacttcgttttgatgcatcttcacacagtgtttagaaaaatagttttttttaaaaaaagcttttaaaaaataattcaaagtgtttgaaagtatcatcattatttgtagttttagggctacaaatgtaatttttaagaaaaaaaaaagctctctacagtaagttctcgtaccattgaaggtatatttttgtgttatagacccatgcagatgcaaaagtccaggtgctggacaatgaaaacgtaagcttgtcattgtttaatgcatacttaaacaattttatttttgtcttgaaattattaataatgtggttttctgtccaattccctaatgcaggtatccaacggttgtgtgagtaaaattctgggcaggtattacgagactggctccatcagacccagggcaatcggagggagtaagccaagagtggcgactccagaagttgtaagcaaaatagcccagtataaacgggagtgcccttccatctttgcttgggaaatccgagacagattattatccgagggggtctgtaccaacgataacatacccagtgtaagtttattgtgaacatcgtgtgtctaccttgccccaaggcccatctctggcgcgtctttatctcctcctgctcttttctctccccaggccttgccatctctctccctctcttccctgatttgtctccagggtacctgggggtatggagaggtgggctttgactttttgaccatctggaaaatgggggtgaagtgtgaggagtagttcccttcatttggataccacagaccaggggtcaaaggaactagggaaaggcacttggaaatgaaaatgaaaaccagattctaaattcccctcaaagcattttcctgaagcttctttcaggcaacatgcatccatttctgctctccgataaagtagatctctaaagtaagtcttttatcactgagtcttggatcaaagcggagcagcccagtgagcggttattcgtgatatctacagaggtgaaggactgctccctcctttacacccaacttcatttccaggaacaaaatgatagctgccattctttccacaaaataagttaaaaatccacagactgttccaggatggctgggagcttttgcatgtgtagtggggtcattctttaaagcttgggagagctgagatggggacctaagatggggtgactacgtgtctttcggagacactaccatttggtttgatttgcaggtgtcatcaataaacagagttcttcgcaacctggctagcgaaaagcaacagatgggcgcagacggcatgtatgataaactaaggatgttgaacgggcagaccggaagctggggcacacgccctggttggtatcccgggacttcagtaccagggcaacccacgcaaggtaaaactcaagcagccaccttcctgaagtgttttactcctctgggcttccagtacctaggagattaaagagggtacaatcctggaaggcttaggtaccccaacctcactttgtaattggtgtttgtgaaagcatcttggtgactgtaaggattatgtatgtcaagggttgtatgaagtggttaggagattgtacatgtgtaaggtcgaacctagtggtgccttattcaaatttgacattataatgcagtagtgtgcactcgcagtacaactgagacaagttaacacaccgagagactgcaaagtaaatataattgtattatttgcttttgaagtaattgacaattatgtaactttgagtaaggtggtaggagaaggcggaccccctaaccccatgtgcatggccagttccctcccccaactttaacccatgtactcccccccccccagttccagttcttattctcggtggttgcaactggttacaagtggggtagggaaaccgagtactgggctgaggctaagagaagaggttctggggccagggggcagataggaactatgttttcctttcccaggatctgtgagaagggtgcaggaagaagagcgggtgggttggctctctctccttcccactcacaccgaggtaacttggtcaagaataggaaacagtttacttcgaagattaatcggtatttgttgtgttcgtgacaaggagataatatgcggggataatgggacgaggagtctcactcccccggagcaccacagagcctggggcatagggccgggggggggggggggggctgcccagggatggcgaaggggctgctgtgaatcggtgagctcttagaccggccccgcgtgcagggcgcctccacagagccgggttagagaagggaaaatcggtaacagtatgcgaaatatctggtacaaaggatgcttctgtcacttgcaagaatttgttatgggaacaatcctgtcgctctgtaattgctcattagagaacgttttgtttctcattaaggcgacatgaataagcgtctagctgaaggagacagctgtagaaatgttccacaagagacctctggacacgattcggcaccaattgccaattagacatgtcagttttaagagcagaaaacaatataggacggacactgggacggtagggagaaaagtgttcctttctggttttcccagcaccgctgccgctcttggtcagtgcaggcttctgatgtacaggcccgggctcccttgggtgacacctcgccgcggctcaggtgacctcgaacctgcagctttgagttggagctcagagtgctcacaggtccaggcatctccggtgtctataaagatcagctaggaaaagatataaccaaccatgcagggcctgaggtttgactcctccatgcattcccaaagaacacaccccagagaagctagaacctcaactggtgaccatccactctccacccccagcactctaaagttctgctaagcccttccccgcccacttgatcgaaggtgtctcggtcgtgggcaataggcccagaagctcagatctaggagggctgagttcagaagccctccactcctgtgctccctggcgtttggggctcaggtttgcatggagaccagggaatgaacaccctcttcctgtctctgggtgccaagactaaagtccagggcaataacttccgctagaggaagtgttgcctgcttagggcacgttttcctcctggagagctggacaactagagactaaaagggaaaggcctggtggtgaccgctgagggcgagaggtggcgctagttcagggacttttaactcaaggcagctagatactagagtgtgctgggtcatacacttcttgaatgtcccacccacccaccttatttacccccacctaagtgcattttcccccaggctctctgctccgcctccagtgtggggaggaagagtggctggaaaggagaatcttgggcgtggggacttcggtctgtggtgtcagctatccaggcttaaattcctggggatctctctggccctttggtgctaagagggtctccctccctccctggcctcctttccagcccaagaggctgatctggggttgtaaagagtccatttccagaagcataaggagaggttaggtctctgagggagacaaatatggtttccatctgatctacgccacgcggcggtgaataaaatcctgacgacgtgggctgacaataacgagacgactctattccagccccaattctccagcgatttggtggttttagggatcacgaagacactttttctcatctccttccctcgccccaacccccataatacccaggccctctataggatttagtcagcctcctttcaacagatgcttcaatgttttgatctgcgctccggagctgaaaaggttccgcaaccgcgttgctatcttttcttgcttgttttccgcctcactgattaagacactaagaaactaaggaatgattttatttcccagcgtctttttttttttcttttttcttttctgtttccccgcctctccctctctctttctctctctcctcttcttcttccaggaaacaaatcctatcccctgcgtcagatggtcctggggctgggataatgggaggcgctttcactcttctctgggattagcctgggaggtgcacggcgcccattgaaggtcccttctttgcgccgctaggaggggacgccttttaaaggagatatcttaattgtctgccacttaagtttatcgtgtgggggaattagaaagctctaacttctatttttagtttcttaaaagatttaagggtggaaggtaaagccaccaaaggcgggggtggggttggggggagggagcaaaaaaccctccagctctatctaagtgagcactcagtcacctggctgcaaacacttgctacttttaaagtagtgaacacattttcagggttgctttctgggctggttaagaggcggcggcagcgggcgggcaggcggcggtgaatcccgtagcgttctctaactccacttttaaaaagaagcagcaaaacggggtttaaatgccattttcctgctcctctagacttttttttttttgtccctaaatatcatttttcaaggtagcgcaaatcctaggtttatgtaaccagcacatgctaatctataagtagtgcctgagcgtggaggactgtcaatataacccccatgctttaaaatgaagaggatgtccaagaagcagatgagaatagagaaacgctatgtgctggcgtcttcagagggagacccccagctttgtttaattgacaagatctaacgtgctagagaagggacagggcttttcttttgggtggaggcataagtgaccaggcaggattgtgttttccaaaagcagtaaccgatggacttttttagtagttccaacggggtggggtggggtgggggacaaaaatgtatcctccttcaccgaatccgacaataaaagggaaaaggaacaggctctcatcattttcccccctgggtggggggaccactttgaagagtcctcaagagacctggggcagcaaattagtacagccacttgtgcccctacacgtgagttcggcgcgtctccttcggcaggcgaccctcccctcccccattcatctgaagtagggcaagatgcctgcggcttgtttaccaatacacgctccctcctccttttccttttcgtggttttctcccttctccgtcgactctccagtctctttttcctcaacatttcccctctgtcccttcttatcctttttgaccaccatctctttggagccctccatctttctctgcccctcccccacaccatccttcctctttagcttctctcctttagcctcccctcagccccagctctggtccccatccaccctccccacttccctccaccccctaccctggccccccatccaccccccccacaccccccagccaagcgccctaaatagcaccgcggcgcccgctctccggacagtgattaatgatagcagtgcagaggggttaacacacttcgctgaaaagtctgttgactgagcttcttgtaacacaatgtggcccgctgcacgcctcgagagaatccttttgttgtccgtgcttattgtggcctcaaaattctgcccacgaaagtttgccaacgctcctgccccaggagtttaatagtttcccttactcgcggggcattgtgtggtgctgaaaagcagcccctcgctattcaagtgttggtggtcatctcaatagatctccaagggcccatatggtggccagtgccgatgaatccgcctgtttaaatgggggagaaagttggggttttaaaacatttcaaagttcctgaaaagatcccactagatcctgtcacaattccctgaacgctttgaaggcgcggcctattgtctcctggttataaatgatattcctggccaagtcgattcccacagaggcctggcgccccctccccccaaactagccaagtttctaggatccggagagaacagttcttgttggtatcccgtgggggccacaggcctcaggacccaagacagcctgcagtgccctgggaagcccagccaaggcctgagtcctttccttcccacaggctgccgccttgcccgaaaggtgcacagcagagccggttagcccaagtgcacagctcttcaccaagcgcaaaggaaaacaatgaaactttccctgtttaatgatagaaattacattaaaagtggtggaaatgccctaattaaaaatgtaccacttaaatgatatgccaaggactcagctgcagcttagcatatttagctagttagtgaactctccgccgtctctcttttaaaattacacgttaaaaatttaaaagaaatcttacttttctctggtgcaacacattacaaagaatggacagtccttttatctaaatataaaattccattttcagcaattatagcctgttcttggtgatgatataattacagctgtgctcgtaataggtgtcaaggcgaaacacactcacacaatggttgaataaaactgcagaacaatgcaagcacttctaaattcacaacctttaaaatgaaattgactgtgcagaattcaaataaaaactagataaatatttttttaaaaagattacaagcttggtttggtttcttaatagcattttctacaaacctatcaacatctaattgattagataggaattactgattatagatcagctgaaatcgtgcacatcactctattttcccaacacagccataggtaaatactttctgtagggcaagggaactggatgtggagtcagagtcggcagggaaagatcattttgcctggaaactttttggcttgctttgtcattcaaagagaccttgcgagagcactgtcaggtctcatctaaatgaaaaccaaggaatgtgactcaggtaactggtgtcattcaaagaaggctaccatctgactaacttaggaaggctttgtggaggcgcagattacccagtcctcggagtttctaactgtgccgagtcccattaggagcccccccatgccgttccgatttctcttattgtcctattctttttgttgcagatggctgccagcaacaggaaggagggggagagaacaccaactccatcagttctaacggagaagactcggatgaagctcagatgcgacttcagctgaagcggaagctgcaaagaaatagaacatcttttacccaagagcagattgaggctctggagaaaggtgactgggaaatttccaaagcagagaaaccttaaatcaaaggaaatgccacagcaaaagcacaaagggctaaatttagctagggctctttgcataaaggatgaaaagccccccccccccacttttcagtgtgtgtgtgttttttttttttttgtgtgtgtgtgtgtgcgcgcatatgcattttctctcttcttttcacacaccagcaaactgaaatattacaattctgacagacaaaggaaatgatgacctatctgactgtcttaggccacagataaggacaaacactaaatgtcattccaaagaaaacttgctcctggtgggaaagttcttgctagtacagtcagcacactgtcaagctgtctgattggctggatgagatgggagttgggtgttaaaagctaggttgatccagtgtctgaactatcttgtgttctggtataatatataaaatcaacttactctttcagagtttgagaggacccattatccagatgtgtttgcccgggaaagactagcagccaaaatagatctacctgaagcaagaatacaggtacctagggaccatgtggtttttatgcactgggatgcttatattttgccttggctgtataccagtcactgatataatcatggtcaggtttgcaaagactcccttgttctagggtaagggtggggatggagggctttttgtttgtggccgagtggtagcaagcatagggctaacctgttctgtgcatttccaggtatggttttctaatcgaagggccaaatggagaagagaagagaaactgaggaaccagagaagacaggccagcaacactcctagtcacattcctatcagcagcagcttcagtaccagtgtctaccagccaatcccacagcccaccacacctggtaacttgaaatcccacctgccaagaacggttcttaaccttgcctgcccttgactttctcttgccttgtaatgaatgaccttgccctctctctgtctcttttctcttcctctgcagtctcctccttcacatcaggttccatgttgggccgaacagacaccgccctcaccaacacgtacagtgctttgccacccatgcccagcttcaccatggcaaacaacctgcctatgcaagtaagagaggacggtcacctgctgcacagggcaagggatgggttcaggcttgcagaccccattcattgcatttactcccttgggagtccttcttgtgacagtgattagcttgaccagtcaactctgagacagtcaatccaacctcttttagctgattgattgactgattgattgattcatgcccttggaaaacaaacactctatctgttcagtcaagttaatgtgcctttcatcattatgttagctggagaaggccgggcgggcgggagtgaggtcgctttcggctaccagggatgtttgtatcaaagtagaaataattcgggcataatgaaaggtactaaagatgttggcatgtaaaaagtttaggtttacgttagtgggtttgtattaataaatgcagaagcagcacaaatattttgaggattacttttggttcctctaagaagctagtgaggaagaggaaaaagggaggggcagctgaaaagcaagattcctctttagagagtgaaatgcatttagtaaaatagggaaactagctccttctacatttaaaagtaaaaatggagtagaaggtatttgctagaaatctaatgtgtgtcagctgtagccgatgtgacaggtcagtggtaacccttgctgcctagggagctggagggcattcttcctataataccctggcccgtgttcttaggggttggttctggaccaagctggcatggcctagtgtaagttctgcatgactcctggtatgtgctagatcactgttgcttagaggattctgatgtcttaggaacatcagcaagtcctaaggctcctgctgtacgaccatcagatatgcctgctggtatacgactggaagcatgagccctgctggaagcagttcgggggagggggttctacagattacttagcctgtactgaacatcttttgccaggcttggaattcaaataacagcaaaataaagtctctcagtcttcaggcctagaactggataagcggtgccggaggacatattcccctgcttcttttctatggcatctgtcttttattggacatagtgcaactgatgtaaatgaaggggccagcagcccattaagtgggtatggctacaactattttggaatttcccagaagtcactttgcctagaggaagtgattgcaggaattagaagcaaatgcaagctgaagttctggcagggccctttaggcctgtttgcctttttgaacttgacacgagcagtcatcaacagactttaatgaggccattgagtagcttgtgcacttttatatattctagcaacttctaggtttctatgagggtgacataatgtgcacatggtaaaaaaaaaaaaaaacaaaaacccagaaataattaaatagatgagggattatattaagcttgcttccatttctaaagaaataggttggggtgacttatttaaacattgacttttaaaaattacacagattatacagtcacaaaagtaaatagcttcattgaacaaagaaaacagaaacaatgtgtgattttattgttcggagaaaactactttttaggttttggaatggggaggggtagtctctgtcaattgcttcttcctgttgaccaagatcctctctgtcttgcaaagaatgggtatcccctgccggaccttcctcggtggctgtcaggctttgtgaaggaaggtctgaggatgtcaagaattttcagagcacagctattgctgaccctctgtttctattgatccgcctcctgaggtttttgacctcaagtaaccttgagggagctgtctcctggctcggcatatttcttgtttagttatgagagacattcatctccccaacatttctgttttgaatactttgaagatagcaatacaattttatggatgagactcaagcaggggttttgagtcagttaggaagtcacagttgattctcaggttgtgtttaagttatattcactgacatttctaacctcttcaatctgatctcattatggttgtggttttttttaattttttattttatttatttattttttattaaatctctaatccttcaagtccagtccagcactgaactgttcccaaggtccctacatcaaacattccagagagtcctactattgctctattgaactatggaatttggtgatcagagcattccacaatagatccaagtttgtagatggaggatatctttcatgatagtaactctagcagaggtaaaagtcagcacagactgccaaaactggacatttgtttgcggtttactgtgtttcagaaatttagtacacagcatgctctggtggtggccaatgaattctaggacattccaaagagacatcagtaatgaccaagcgtgctggcaagccctggagaagagggtagcctgggatgtagttgtctggtggttccagtaatcacaggcttttctttcttctggcagcccccagtccccagtcagacctcctcatactcgtgcatgctgcccaccagcccgtcagtgaatgggcggagttatgatacctacacccctccgcacatgcaaacacacatgaacagtcagcccatgggcacctcggggaccacttcaacaggtgagctctctgcagctgtgtagaggcatctactgggcctctttgaccagctgatctttcacactgtgtttcctattgtcttgaagagaaacttctgaccttgcattcaggactgtgttgaatattttactactcttgtcttgaaagaaaacagactgaatagggaaattcagttaagttagcgcgttgacagcatatagacaaatcatcgcttatggtggtaaatgtgatcacagagacagagtatggagacaagaacccaaatcacgttttcagatgatatcttagtcagagctggacagtgagggtccactgaactttgatgtgatgggtactttttagaaggcgttcacatcttctagcttcttgatgccagctgaggagtggagaagttaggtctggtttttccacccagccccattttggcttctgaggatgtagcatgttagtcttccagagatggttgcactaaaaaacttccaaacattgggtatcatgaggtacttgcaaacatagcctcgagtttcaaaaggtctgcttttctttctaattgttgaaagttttctttctttctttctttctttctttctttctttctttctttctttctttctttctttctttctttcttttttataaagtaaaaaccatattatgaagtgttaggaattttagaaggtctgtgtgttcatgctgtgttctatcgtagaatctacctatgcggatggtgtttgaattttagaaagtctgtgtgttcgcgccgtgttctattgtagaatgtacctatgcagctgttattgtattcatttataggactcatttcacctggagtgtcagttcccgtccaagttcccgggagtgaacctgacatgtctcagtactggcctcgattacagtaaagagagaaggagagagcatgtgatcgagagaggaaattgtgttcactctgccaatgactatgtggacacagcagttgggtattcaggaaagaaagagaaatggcggttagaagcacttcactttgtaactgtcctgaactggagcccgggaatggactagaaccaaggacctttgcgtacagaaggcacggtatcagttggaacaaatcttcattttggtatccaaacttttattcattttggtgtattatttgtaaatgggcattggtatgttataatgaagaaaagaacaacacaggctgttggatcgcggatctgtgttgctcatgtggttgtttaaaggaaaccatgatcgacaagatttgccatggatttaagagttttatcaagatatatcaaatacttctccccatctgttcatagtttatggactgatgttccaagtttgtatcattcctttgcatataattgaacctgggacaacacacactagatatatgtaaaaactatctgttggttttccaaaggttgttaacagatgaagtttatgtgcaaaaaagggtaagatatgaattcaaggagaagttgatagctaaaaggtagagtgtgtcttcgatataatacaatttgttttatgtcaaaatgtaagtatttgtcttccctagaaatcctcagaatgatttctataataaagttaatttcatttatatttgacaagaatactctatagatgttttatacacattttcatgcaatcatttgtttctttcttggccagcaaaagttaattgttcttagatatagctgtattactgttcacagtccaatcattttgtgcatctagaattcattcctaatcaattaaaagtgcttgcaagagttttaaacctaagtgttttgcagttgttcacaaatacatatcaaaattaaccattgttgattgtaaaaaaaaaaccatgccaaagcctttgtattttctttattacactattttctttttaaccttatagtgtggtgttacaaattttgttcccacattaggttaatgtcctaaatcaatggttactttcatatattccattttacaacctgatggtcctcaaagaaataatttttacagatatcagaagttggtaatgtattgtaaaaaaacctaaaacaaaacacagctagctgtatgtaggtctgcatcccacaatgtgtacagaaaatagtaatatttcaaatttatctatttatttgattttaaagctcaaagtgtagaagtaattaaaaaaatgcaacaagggattcactaggaattgttttgaattagagctggcatttttaacctgggcaaccaatccccacaatgattccactacagtcatattcaaaggttgagttcttaaacaagatcctctgacagctgttgccaatctcagataacccttcttgctgtcctgtctccccactctttgcataagaggcatcggctcccattgaacccctccagctgctcccatgtgtgtcttgctttcggtgctgtggtgggtggttggagggtggaggggatgttgcatgtcaaggaataatgagcacagacacactaagagacaacaacaaagcg

SEQ ID NO: 35 - DNA, 5119 bp, Mouse
cttgaaactcactctatagactaggtcagcctagacttctctgagatcctcctgcctctgcctcaaaggcagaagacaacacttcaaatgacactttttaacacctagaagctaaagagaaaagaaactgaaattttcaatttttataagacagtcctggtctctgcaggcagagaacacagatcctcctgaagtcatcccacaaggcccattattgattttttttctcctgccctacccccacctactgccctgtttgttttagttacgaaatgctttgggcaccttggatttaactgaaaagtaaccttgaaacaccgaggccctcatgccagaggcaaatcgctgcctcccgggtattggctgcagctaaacgggtctctccaggccgactgaggtgggtagccagaaagaggactgaggtaactgacgaccagggcggccagaccacgcgagtcctacgcgcctcctgaggccgccccgggacttaactgtaacggggaggggcctccggagcagcggccagcgagttaaaggtgtgtacacagtttttctaaataggacagcgctttgcaaattggctgtcacctgcttgttgttttgacagggaatgtgcactaaaagggaggaaacccgagataaataaatctggcttgcctcgctttgcaggccaccaaggcggtacgcgccttcggattgacgaaccccgtgcttggggcgatgaggaggggcggggcgggagcaggagacctgagtttctccaagggtggcttgatcccaggtctctgggtccacggaagactccccgtggacgtaaaggaagggactccaccagggcgccagcacgcctgcttgcaggtcggggtcttgggagtgccagggacagcaggagatgggctagctcggggcgcccagcggcaggtgcggaacgctagccctggcttcctctcacctaagtgtgagctgattattcaaatgggctgcccggggtctggggattggaggccagcgccagcgcaccgcgctatatcaccagccgctcacgtcattgcggcacttgtccgctgcgcggtccacacctcctcctcctcctcctccccctcctctcgctctccccccgcccgcccccacgccgctagcttcccgccgcctcccggcagctcgacactgccagcctcagcctgcaccggcagccccgggagcgcggcgacagagtgcacgcccgacggcgagtctcgggttccggcctccagggttcttcggccccctcctccgccagccaccttcccgcccactcccagctacttcccgccgcaggccgcgggagagagagaggaagtggagtccagagagggagagagggggagcgcgagagagggcgggagggaggggacggtaccattgctgacttttttttttaagagggtgggggtgggggctgattgctggtcgtttgttgtggctgttaaattttaaaccgccatgcactcggcttccagtatgctgggagccgtgaagatggaagggcacgagccatccgactggagcagctactacgcggagcccgaggtaagctcttgccctggccagggagaagtggggtgacagctatctccgcgtccccagcctccgcacgctcccttcaccggtacccgcccccccacctctagccttcctggacagccgccttttccgccctccttctactcaaatgggtctcttttttatacgacacactgttagccttgagataatattaactttgtgatcaaatattgacttgcggcgcctccaaatcctcttcgtggccgagccacgcactatcctaacagagttatgtttggcagcgcgcggctggggaggggtgggaggtcggctggcgagggggtggggagctggggaagagaaggtgggtaggagttggggacagaggtacaggcaaagaatcaaagaccagtggacaaagagaaaaaaagtttgtcgctacgaagccgggacactaacagttcctagccgagttggcggtcccttccttattcctccacgcgatgcctccagctgctcccggactctgtgcaggcactgcgcttcactcccctatgactaaggagtggggtcccggtacgaaaccccagaatagaggacactgagatgattttcgcttgagactgccccagtgaggttccaaaggtggcttttgactacctgggatagcaacggagatttccggcctcggtgctgactcagtgtgctggccagctgatttgaggagcccctagggagagtaaaatacatttggggcgcctgagttggcggtggtccaggtcactgaagttctagaatctgggcgaggctgagcctcaggtcccgctggccctagggcgatctcttttccggctctctttggggcccagaggacttggtgttggtgcactgggatccagggaaagcaagagattccagaggcttgcacgaattgcgggggactgggtccaactggtgggtgggtgggaagatcgggcgagctcagcctaggtgctaacctgtctcctccccgggctctgtccgcagggctactcttccgtgagcaacatgaacgccggcctggggatgaatggcatgaacacatacatgagcatgtccgcggctgccatgggcggcggttccggcaacatgagcgcgggctccatgaacatgtcatcctatgtgggcgctggaatgagcccgtcgctagctggcatgtccccgggcgccggcgccatggcgggcatgagcggctcagccggggcggccggcgtggcgggcatgggacctcacctgagtccgagtctgagcccgctcgggggacaggcggccggggccatgggtggccttgccccctacgccaacatgaactcgatgagccccatgtacgggcaggccggcctgagccgcgctcgggaccccaagacataccgacgcagctacacacacgccaaacctccctactcgtacatctcgctcatcaccatggccatccagcagagccccaacaagatgctgacgctgagcgagatctatcagtggatcatggacctcttccctttctaccggcagaaccagcagcgctggcagaactccatccgccactctctctccttcaacgactgctttctcaaggtgccccgctcgccagacaagcctggcaagggctccttctggaccctgcacccagactcgggcaacatgttcgagaacggctgctacctgcgccgccagaagcgcttcaagtgtgagaagcaactggcactgaaggaagccgcgggtgcggccagtagcggaggcaagaagaccgctcctgggtcccaggcctctcaggctcagctcggggaggccgcgggctcggcctccgagactccggcgggcaccgagtccccccattccagcgcttctccgtgtcaggagcacaagcgaggtggcctaagcgagctaaagggagcacctgcctctgcgctgagtcctcccgagccggcgccctcgcctgggcagcagcagcaggctgcagcccacctgctgggcccacctcaccacccaggcctgccaccagaggcccacctgaagcccgagcaccattacgccttcaaccaccccttctctatcaacaacctcatgtcgtccgagcagcaacatcaccacagccaccaccaccatcagccccacaaaatggacctcaaggcctacgaacaggtcatgcactacccagggggctatggttcccccatgccaggcagcttggccatgggcccagtcacgaacaaagcgggcctggatgcctcgcccctggctgcagacacttcctactaccaaggagtgtactccaggcctattatgaactcatcctaagaagatggctttcaggccctgctagctctggtcactggggacaagggaaatgagaggctgagtggagactttgggagagctttgaggaaaagtagccaccacacttcaggcctcaagggagcagtctcacctgtctgtgtccctaaatagatgggccacagtgatctgtcattctaaatagggaagggaatggaaatatatatgtatacatataaacttgttttaaaggagcctttggtctcctctatgtagactactgcttctcaagacatctgcagagtttgatttttgttgttgttctctattgctgttgttgcagaaaagtctgactttaaaaacaaacaaacaaacaaaaaacttttgtgagtgacttggtgtaaaaccatgtagttttaacagaaaaccagagggttgtactgatgttgaaaagaggaaagaaaaataatgtaagagtctggtgtaccggaccaggagaaaggagaaaaacacatcccattctggacatggtgaaatccaggtctcgggtctgatttaatttatggtttctgcgtgctttatttatggcttataaatgtgtgttctggctagaatggccagaattccacaaatctatattaaagtgttattgccgattttatccctgtatcctttcttctccttctctctctctctctctctctctctctctctctctctctctctctctctcaaaattaaacgaacttattggttattgcaaggatatgggaggaaggtgggagttcgttgcagggggtggggttgtgggagacggggtcaatattgctgcttacccaacattttatttaaatatcataattgactcaattgtcctgttagagccactgtttcgttgtcctcctgatgtttgtccacctagccacacctccatctttcctccttaaatgcttttcagagtgtatgggaagacaacccctaactgatgcagtgactacagcagtaaacacaacaacattgctcacacaacaacattgctcatggtcactttttaatttttgaagttaatattactaaacatgacagaacacataaattcttgatggaccatcccagcatctttattcatactgctatttttattaaggtgcagagattggagagaaggtctccttaaatggccctgactggcctgggacgcattataaagaccaggttttggtcctgcctctgcctccccagtgctaggattacagacctg

SEQ ID NO: 36 - DNA, 4576 bp, Mouse
catgaacgtatttttctgccccccacatctcaagtgctggaattatagaattacaggcactaggcatctcatagactgtctttcggaattgtactagatgaacattcaaactgagctcgatcaccattcctttgagttttcctaccttaaaactacgcaaggatgaccgttggatctggtagagaacaacacaaacatgcaaacaaactcaaatgtaacacagagcttttggagctccttgtctgaaggagggctgctaagtgtgtgtaacactctcccagtgtctgccttaacaggtgatgagtctccctttcctctcctagaatctataatgctgcccttgaaaaagactacgtctagaactaaatgagtttgctaatatttggagggtgctgagtggttgctgggataagcattgtaggaaggcatgttttgaagcccgtgggaaagtactttcaggtttaaaataaatttaagggtggtcagcttttcattccagtcttaagaaaacgttgtaaccgtctgtcaggctaacagtcttacacgctacggatttgctgcttaaatggactgatccttttcctccgaggaacagcacagtgctgctgtctttgcactttattttacattttaatctcgtggtgtttgcgatggaatcatggccttgcaagtctttagaaataaaaccagatcttgcctcttttgccgaacacacaaaaggagcttttgttttatatttttatgtttcacactgaaattcctcagggttgacttgagctcttattgagcagtgatatattagtgatatagcattttatgttaaactttgttttattacaacttgctatttaccttggatatttttattataatataagcatgatggatgagttcttgggagaagaacaggattttttttctctgaaaaatcatgctaagttaattaccttcggtaatatttttttaaaagaatggaataaatacctatacctagtatgttgatgtgaacaaccttggacttgttcttcaatcttccgttacagtgagcagcacctccagacatctgaatttcagccttcctatttccccaagaggtcttggcgccagcgcccggctccagccagttttccccaaggcaggtgtagccagaacactgccgggggaggggaaaggggcgggtgtgggacttgggactcggaccactggctgggcgggggcctaaggactagggtccggtccgcccccgcctcgccattggccgcgtccataaagaaaagggccccgcggcccggggggacacccgcagtgtcactgggtagatctccagcgcggattaggcgaagggttaggtctaccaggagagcagcgggagggtagcacccgctcagctttacgagttcctctgggcatctccaggctagcttccgatccctgcctcagggtcgggggaagcggcgtgtcccgtggccatagcagagctcggggtcggtctggagagccatgagcagcccggatgcgggatacgccagtgacgaccagagccagccccggagcgcgcagcccgcggtgatggcagggttgggcccctgtccctgggccgagtccctgagccccctcggggatgtaaaggtgaaaggcgaggtggtggcgagtagcggggcgccagccgggacgtcgggccgagccaaagcggagtctcgcatccggcggccgatgaacgcctttatggtgtgggccaaagacgaacgcaagcggttggcacagcagaacccagatctgcacaacgcagagctaagcaagatgctaggtgagtcggaccagggggatacagggcaccggcgcactccagagaatctccttgagccacttccttgagccaagaggtgtgctgtagactcaatcccttcttccagctccctctctcgccaaagtaacactttggtctttgggccataggagcgaatgtaagggtttctcagtatttcagagaggtaacccgcacagccctggctcgaccccttcccagatcaggggactttggcagtttttcgagttaaggggagaaaggtaagggaggaagccccttctaggcgtcctgtaaggacgcgatctaacactttcatccgaataggaccgggcttctcacctgctcgctcagtgagaggttgcaccagagaggggtcagggtgccggagctcactcgggtaaccctgcgcgcctctccacctttccctgcaggcaagtcttggaaggcgttgaccttggcagagaagcggcccttcgtggaagaggccgagcggctgcgcgtgcagcatatgcaggaccaccccaactacaagtaccggccgcggcggcgcaagcaggtgaagcgcatgaagcgggtggagggaggcttcctgcacgctctcgtcgagccccaggccggcgcgcttggtcccgagggcggccgcgtggccatggatggcctgggtctgcctttcccggagccgggctatccggccggtcctccgctgatgtctccgcacatgggcccccactatcgggactgccagggactgggcgctcccgcgctcgacggctaccctctgcccactccggacacatccccgctggatggcgtggagcaggacccggctttctttgcagccccgctgccaggggactgcccggcggccggcacctacacttacgctccagtctcggactatgcagtgtccgtagagccgcccgctggccccatgcgagtggggccggacccctcgggccctgcgatgccggggatcctggcgccccccagcgctctgcacctgtactacggcgcgatgggctcgcccgccgcaagtgcggggcgcggtttccacgcgcaaccccagcagccgctgcaaccgcaggcaccgccgccgccaccgcagcagcagcacccagcgcacggccccgggcaaccttcgccccctcccgaggctctgccctgccgggatggcacggaatccaaccagcccactgagctcctaggggaggtggaccgcacggaattcgaacagtatctgccctttgtgtataagcccgagatgggtcttccctaccagggacacgactgcggagtgaacctctcagacagccacggagccatttcctccgtggtgtccgacgctagctcagcggtctactattgcaactaccccgacatttgacggttgccgacccgacctgagggccagaagcagtgttacacacttcctggaagcgctaaggaaatccttagcgtcaagctgttttgtttttaagttgccttggcatataatttatggtaatttattttgtctgccacttgaacagttgaggggctacacgagatttttgttttaaatgccttgagggacttgctccccacaatcactgtccagttttagccagttttaaaatatctcactgacttattccatttcttgaaagtgtattgatctagagaaattttgtcatgcgtgttttctcaatcttaaataaatcctggaatctttttaaaatctctcgcatcgatttttatcaaattaaagatcaacagtaagtattatacaattagaagtgtatacttaattgtaaaattttcatttttcttacaatggtaagaaaatgcatctaagaaaccctaaacacaaacagcggggtgttcaaatgtgatataattgttctgagaaaaattctcaaaagatgaacttgttatgtacattccaaatattggtttctaaaaatgatactgtaaatgtttttaattctgtacactttaatgaggctgttcaaaaatttcggattttcagtcatctcgacacctgccaaaagagcttttcagatataactctttcctgtttgtcttttcttccaaaagtcttgatcccacttcccacaaaatttgcctttaattcctacaattttagagtcagagaaactaatcaaaataaagtttgtgttgtgactgttagtgaactttagtatgtaatttcaaccgtgcatcttgctatagctagattgtgtcccttcattttacagttttcaggctcaagattctcctagagtgatttgtgtgtggtgtgctttacgcaggtgaagacacaaaccagcatccgtcctattgtgaagaaacaggtacaagactagcccctgcaaatgctgtgctgagtgctgcggtccacatggccatcataggaactgctggtttgtgggcttttcctgtgccaggtgtttccttagtgtcattctgcacagcttcggtctgagcaagcctgcctcccagttgagcgctattctctcattttccagtccccatacaggctggggactgaagccacagcttcatcaagggagacaagagaaccacctttgagctgcaaacccagtccagatgctaactcctaatgtatttacagagtctctttgtgtagggggcataggtgggcactagaattcacattctggtcaacatgtaaggtatttagatgatggaaaacttgaaggcgatggatttgaagggttccatggaaatgtcagtgtaacattttaaaggggggattcctgattacta

SEQ ID NO: 37 - DNA, 17768 bp, Mouse
caccaggacaggactaggcatgactactgtcttcaaataaatagtgactactctttctaggaagtttaaagaggaattgatccaagaaagaattatctcttctgtttagtttctttttttcttttccaggatggggttttggcttaattctgccacccaccctcaccctcagtagaagttattccatgggcagactttatctatctatctatctatctatctatctatctatctatctatctatctatctatctatctacctacctacctccctatccatctatcatctatctatctatctatctatctatctatctatctatctatctatctatcatctatctatctatctatcattctgttcatctgtgtagaggctagtctgttattccatttcaggactcttttgagtgataaaacaagcaaggaaacacttttcccttctccttcattttgccttgactcctgtggttgattacagaatttgtacacctttctgaagatgaggacacaagatgaggtcataagacatagatttctttcattgtataaccagatataaagaagaatgcttctcctcctcctcctcttcctcctcctcctctcttcctccttttccttcttctcctccttcctcttctccttcttgtcactgaatagtccctgtatatttaggaaccatggggttgatttggatgtagtcttgactgactcataagtgagataactggtctgctactaattattatcctgtggtgttagaggaagtatgttacgatggcaaagaccatcatcactgtcattggagtgcctgttctagtgtctcctctaaagcaccccgagaaagaggttcatgttagatgaaaacattctactccagacccgtttcacacatagcctgagcatggggtggggacacaagacttctgaaagtcctctgcacttgttttttattgctctggcttcttctcagttcacatttgagacactgtgtgctttatggaagattctaactttaaaaagatgagaaagacttggaagccctataatgagacccacccctccctcatacacattcttcattacctgtacataaaagcatatttgggatgaacaacctatgcaattcagttcttagcttttaaatgtggcatgcttccatgccaaggcccacactgaaatgctcaaatgggagacaaagagattaagctcttatgtaaaatttgctgttttacataactttaatgaatggacaaagtcttgtgcatgggggtgggggtggggttagaggggaacagctccagatggcaaacatacgcaagggatttagtcaaacaactttttggcaaagatggtatgattttgtaatggggtaggaaccaatgaaatgcgaggtaagtatggttaatgatctacagttattggttaaagaagtatattagagcgagtctttctgcacacagatcacctttcctatcaaccccactagcctctggcaaaatgaagtgggtaacctttctcctcctcctcttcgtctccggctctgctttttccaggggtgtgtttcgccgagaagcacgtaagagttttatgttttttcatctctgcttgtatttttctagtaatggaagcctggtattttaaaatagttaaattttcctttagtgctgatttctagattattattactgttgttgttgttattattgtcattatttgcatctgagaacccttaggtggttatattattgatatatttttggtatctttgatgacaataatgggggattttgaaagcttagctttaaatttcttttaattaaaaaaaaatgctaggcagaatgactcaaattacgttggatacagttgaatttattacggtctcatagggcctgcctgctcgaccatgctatactaaaaattaaaagtgtgtgttactaattttataaatggagtttccatttatatttacctttatttcttatttaccattgtcttagtagatatttacaaacatgacagaaacactaaatcttgagtttgaatgcacagatataaacacttaacgggttttaaaaataataatgttggtgaaaaaatataactttgagtgtagcagagaggaaccattgccaccttcagattttcctgtaacgatcgggaactggcatcttcagggagtagcttaggtcagtgaagagaagaacaaaaagcagcatattacagttagttgtcttcatcaatctttaaatatgttgtgtggtttttctctccctgtttccacagacaagagtgagatcgcccatcggtataatgatttgggagaacaacatttcaaaggcctgtaagttataatgctgaaagcccacttaatatttctggtagtattagttaaagttttaaaacacctttttccaccttgagtgtgagaattgtagagcagtgctgtccagtagaaatgtgtgcattgacagaaagactgtggatctgtgctgagcaatgtggcagccagagatcacaaggctatcaagcactttgcacatggcaagtgtaactgagaagcacacattcaaataatagttaattttaattgaatgtatctagccatgtgtggctagtagctcctttcctggagagagaatctggagcccacatctaacttgttaagtctggaatcttattttttatttctggaaaggtctatgaactatagttttgggggcagctcacttactaacttttaatgcaataagatctcatggtatcttgagaacattattttgtctctttgtagtactgaaaccttatacatgtgaagtaaggggtctatacttaagtcacatctccaaccttagtaatgttttaatgtagtaaaaaaatgagtaattaatttatttttagaaggtcaatagtatcatgtattccaaataacagaggtatatggttagaaaagaaacaattcaaaggacttatataatatctagccttgacaatgaataaatttagagagtagtttgcctgtttgcctcatgttcataaatctattgacacatatgtgcatctgcacttcagcatggtagaagtccatattcctttgcttggaaaggcaggtgttcccattacgcctcagagaatagctgacgggaagaggctttctagatagttgtatgaaagatatacaaaatctcgcaggtatacacaggcatgatttgctggttgggagagccacttgcctcatactgaggtttttgtgtctgcttttcagagtcctgattgccttttcccagtatctccagaaatgctcatacgatgagcatgccaaattagtgcaggaagtaacagactttgcaaagacgtgtgttgccgatgagtctgccgccaactgtgacaaatcccttgtgagtaccttctgattttgtggatctactttcctgctttctggaactctgtttcaaagccaatcatgactccatcacttaaggccccgggaacactgtggcagagggcagcagagagattgataaagccagggtgatgggaattttctgtgggactccatttcatagtaattgcagaagctacaatacactcaaaaagtctcaccacatgactgcccaaatgggagcttgacagtgacagtgacagtagatatgccaaagtggatgagggaaagaccacaagagctaaaccctgtaaaaagaactgtaggcaactaaggaatgcagagagaagaagttgccttggaagagcataccaactgcctctccaataccaatggtcatccctaaaacatacgtatgaataacatgcagactaagcaggctacatttaggaatatacatgtatttacataaatgtatatgcatgtaacaacaatgaatgaaaactgaggtcatggatctgaaagagagcaagggggcttacatgagagggtttggagggaggggttggagggagggaggtattattctttagttttacagggaacgtagtaaaaacataggcttctcccaaaggagcagagcccatgaggagctgtgcaaggttccccagcttgattttacctgctcctcaaattcccttgatttgtttttattataatgactttactcctagcttttagtgtcagatagaaaacatggaaggtgacattcctcaaggccattagctctttgcttctctgtgttatccatcatacacaatattgtggcacttgactatcatgaaaattacacagaaattgacaagtccaaggaaagtaagtggtagggggtttctacatgatcttcgtttgcctcgcagtttaaaaacgtaacttacttcattaacaatttttttatacttaaatttattttaagtggtatgtagaaccaaaaaaataatatatagctcaaggtgttatcaatatacatatcatctatgcacatacatacaaggtacatgttttcttcaccaatttttatcagcacatttggttttgatgctgctctttggctatgaagaaagttggggtaccggcaggaatttgacttttctctcttcctcttagcacactctttttggagataagttgtgtgccattccaaacctccgtgaaaactatggtgaactggctgactgctgtacaaaacaagagcccgaaagaaacgaatgtttcctgcaacacaaagatgacaaccccagcctgccaccatttgaaaggccagaggctgaggccatgtgcacctcctttaaggaaaacccaaccacctttatgggacagtgagtacccagacatctacactttatgctaaaaactgggcaatagctccgttagtaacacttatgctgatagtcatgaaaaccccaagcatccaacaccaagtctgggaatgtgttgagatggtgtttaaaaacataatacttgataccacagactatacaatgacagtaaaaagatcaatgatgttttgatattgaaaacaggacctgtgtgaaatatctgagactgagaagttgcaaaatattctgaaggcatttgtgtgcatgtgcgtgtatatgtgtgtgagtatgagtatgtgtgtggtgttcatgttctctggatcaatttcattttagtcatcaacattacatcaccaaaatttacttaccaaaaatgtacacatgatgtgtgaacatttacaaacacacacgcgcacacacacacacacacacacacacacacacacacacacacacacacacacatatctacatatctctctttgctcacttaacaacagacaaagtccatcactcatgggtgaccacactgagtgaaaccggtcaattacaaatcccatgtgtatccaagggtgtgggttgattctaatcatttctgtagtattgttctgtggggaataactgcctgttttcttcttcttctttcccataactcagctatttgcatgaagttgccagaagacatccttatttctatgccccagaacttctttactatgctgagcagtacaatgagattctgacccagtgttgtgcagaggctgacaaggaaagctgcctgaccccgaaggtaaactcctggaaagacacacacaacacctgctttgaattccagcctaagattttgatcatcttatggccagattcaggaggcttggctttctgcatgaaacatctctttcttcttaacttaccaacagatttttgttcttatgcctttcttccttctaaactttagcagtggtctgagagagggaattcttgtacttgcgttccttgtcttctcattcttcatggtaatgctgtctacagtagaagactctttgtcaaactgtgcagaaatggctaggttttttttctttgtttttgcttttattttttgaccttctctgaggcattttactggagctttcttaaattcgaaggagagaatttttactgaggctagaagttcgagttcattccttccttccataaatatttgttacatgcagcattcattttttggaggcacttactgattttatgaaagttaatggaggaaggactgaaatggattagtcacaaaataaaaaaagtcagtacaggtatatgtgctgggacatctcctttccggacccttccctcagcaatgtctccaaggtgctttaagtagctagatgctaagaccggacagattttcttttcccttagatatcaaaataattatttgccagaagggagtgcttgggaatggaggcataaattatcttttttaagttttcatttggatcgaaggtccaactaaatggcagagttcatacctaacatgcaaaaggtcccgatttcaactcctccccaaccaaaccaattatttaggcatagggccaactgaaactttgggaggtgtgtgtgtataaaaataatcttttccaatttttttccacttgggttttcttttttgtttgtctgtttttagcttgatggtgtgaaggagaaagcattggtctcatctgtccgtcagagaatgaagtgctccagtatgcagaagtttggagagagagcttttaaagcatggtacatgacttttctttaacatcacagttcgcatctttctgttgatagctgtctaatcaaaaaagctgtgcctttataaggcactttatgaaaagacaatagaggtgaagtcagaatagcagtaataatttgacatttttgtctcatcgttttgttttaaattatcaaggaatttagaagacttttttttttttttcctaagagaagataggtatttaaaatctcatttgtttataaagactgggactcattttcaaagcttacaaaatgcagtcctagtcagggtgatgaatttacttaatttatgttccctcagtctaaaactgactgttttatgtcttgataattgaatttagccatcaagccagctggagttactacttcgaattttattacaactccaattgtgttcttaatctcatgcttttgtttgaccctctctttgcttttatagctgtagctgagtctgggtgcaccctttaatatggcagccaagaaagatatgcttgctcttctggtacctcacctaaccaacacaataggagagaaggttgagatgactttgtgtgtgttctctagaaactgtctgcacaactttcctcactaagtcattcccactctccaaatgattacagccagatcaaccaaagaagcagcttcaatatgaaactgttacacgggctgtgactggctcctgcaaaggagtcttttactggagtaaaggaactgaaagttattttagaatgagaatcttgggttttgccatagggctcagaggctgtctgctggaacagcttctaggcaggaggatgcgtgtttagaactctccagttctctagaacttaagaacacccacaaccccccaactttaggactcagagaaatatgtcttatggtaaaagatgacgaatcttcatttccagatgagaatgctttcatgccattacgtaatttaatctcccagattctgcatgttgtaacactctaaaagctaacgcctgctggtggtcacagtgctaagatgggatcaaactgaaaacagaagtcagataaggacttaaagctttactgctgcccctttggggaaaatcttctatgattttaatttaatgaggtcttagctttccacacaccaccgccattcatttagtagataattctgccaaagaaaaacataactatcatgccagattagcattacaagaactaatgaatttttataatttgttcagttaatttggttttgaacttcaaaacagtttataataggttttgaacttgttaaaaatagtgtcttttgttattgctttcatacaaatacaatatgataattcattgatggaaaatctgtttgtttgtttttccttttcagggcagtagctcgtctgagccagacattccccaatgctgactttgcagaaatcaccaaattggcaacagacctgaccaaagtcaacaaggagtgctgccatggtgacctgctggaatgcgcagatgacagggtaaggaaggagtcattacatgctcagttgagcgcctgtgtttggcttcatcggagaacaccaagggcgggtggtgtggccggtattctaccaagctctccttggttgctgccactttccagaaaaaaagaccaaaacaaacaaacaaacaaacaaacaaacaaacaaaaaactccccccaaaaatccaaaaaacaaaaccaccaactcaaaatgttttcggaattattcaatgacccgaaactcctttcttcagtcacactttgagaaggcattaatggaagagaacaagccataaaatgtagatttctaagaggttttggggagagaagcaggggctagacatcccacagagcagagaggcttttaaaaatgtgtctatcccttggtggtctttcccctaatctactgtctgcgttaagtacatacagattcactgtgatctcattttctccaacattgtcctattatctccctcccctccctgctccaaagactaaaaatataaccaaataccagaatcctcttctaccatagtaccttccggaaaactcaagacagatattttgtatatgtcagcaagacctgtaattgtgctcattactgattatttaataatacttcatattctaatgggttatttagtttcaaaatgcctacccttaacttgggagaaaattttttttcaagcactaacttttatagaaaaagtaacttgaattatcaaagtcagaaagacatagatttaataattaaaacaaactaatttaaatagatacatagcttgcttcagaacggtctttctcggatctaaatggaatgttttgatcatagtatcctagtccacaggttctgcagcactgcagggctgagaacgagtttacagaaaccactttggttgtgtctggtttagggcaggatgaagacactttcctcacatgacagaggtgcagggacaaaatgtagctaagataattcctctgaaacctttgtttttcattctcacaggcggaacttgccaagtacatgtgtgaaaaccaggcgactatctccagcaaactgcagacttgctgcgataaaccactgttgaagaaagcccactgtcttagtgaggtggagcatgacaccatgcctgctgatctgcctgccattgctgctgattttgttgaggaccaggaagtgtgcaagaactatgctgaggccaaggatgtcttcctgggcacgtgagtagatgcctttcctttcatagctttgtcagagctgcatggtttaggactctacaccaggctttcctttggtgttagcaggacttctatggttctcagaaaaattattcatccttgccattttcagcctttaaaatttccttgaaaagtattttaagtaatttaaaatatttttttatgaaacatacatgcattcagcataaactcaatgttccttacttcataggaatatttctggaaatctttagaaatattctatgaatatgtaagtcatatgtaccacttaatcatttttatgagcatatatcttaaatacatagtgtatataaatatatcacctatctatctacttacatactcagctctatctagctagctctgtgatgatatcaaggatatctatttctatgtatataagcaacatgacactagttgtttcatccttggttgaaaagaccagaatatcacaatatagcaagacatgatgcaactaataacaaatgacaaaatattttcaaaaagtacagcaattatttccattgtacaatggagggagttaatgcattgattgattgattgattgattgattgatagttgcccacccagaatattaaaacaggtttcagtggcaaagctgaacgtgggaagagttctctctgggtcccacattcttgttgtttagttttctgcatggagctcgctccaatgcaggatgactgggctgagaatcactactgaggttggttatggggctctattacatattcatttacttaactcagcctatgttcatctcaattaggttcttgtatgaatattcaagaagacaccctgattactctgtatccctgttgctgagacttgctaagaaatatgaagccactctggaaaagtgctgcgctgaagccaatcctcccgcatgctacggcacagtggtaggtttccatgagccaagaacacctacagtgtggatggcactttctataaggacgagggaagagatgaagtcacgataatcgatatgtaggtcaatacagatgttttcttgagatggaggcaagttctagctctttaagttcttcagcatcataggataaactctttggataaaatataaggaaacctagaacaaccgctctagaaaagaaaggttcaaagagagggaggaatcttttcttgcacaaaatctttattgtagctttccctttttcatactcccaaggataaaattagagaataaagtccaatgccaactaaaattcatttattcaacttagatttaaggactattaacctgtcccaccacactatcaactattagaattaatatctcaaaggagtctgtaaactctatttctttactattttggaggttttggtgaagttttttgttttttgtttttttgttttgttttttttttttttgagaagttttacttgcaagtttgttgtagagggaatcaggactcctctcagctcatactagattctgaaccacttgggaccagaagagaatcgtactttacaaagaaactgctgaataccagataccactcagtggttgagcctcagggtggatacactcatctcagagacttcaagagagaccttagagagattgctaaaagtgatggccactatctagtgaacttctgctgtgcaccagttgatgttaatctcatccacttagtgggttaagagaccagttctggtgctgaggacacgtagcccagtacagtgcagacatgatccatctgaagcttgggtgtggaaagaacagtctcacaacaagaaagcacatcaggtggcctgcttcaagtacagccattgaatcccagagcctgaagattctcatttgacttgtgccaaatgaccttgcaaatacaaggaacaatttaaacgcaaggtgacagatgtggcacaaaagatctcctgacttgtcttttacttgtctttggacagagggatggcagtagtgtgaagtggcctactttgggctttcaggaaggggggctgtaaacacaattcttttattttgcagcttgctgaatttcagcctcttgtagaagagcctaagaacttggtcaaaaccaactgtgatctttacgagaagcttggagaatatggattccaaaatgcgtgagtagttttatcagctagttttttttttcttgatcagtttgtgattatttaaaacagcatacaggctatccagcatatggctttcacaatgaaaacattatttataatacagatctatcaagaaattctggcaaggagacagcttagttagagggacgaagagaactgtaaccctgcataatataaacactgatctcttgggagaagaagttttgaggactcagcaaatcttgatacattagaattcagagtgtccttcaagggttaggtggagtttatgagcaaacaatagaataatatttagtagaaaaagaagtagcatgctttgggcagcagaaactcaagaaccgatagaaatgctgaacacaaaaatataacaaaagatttagataaaatggaaacgttacatgaataggagttcacttggggaaaacattggaatttgggagttacagataaactttggtagttgtaaccttgtcttcctatggaatttcaatctcagagatagagactgaatggtcttctagagtcatttcatagaactttatctatggaagtaaagggagcatactggaagagacacattattccttgtttatttcatatacaattttagcactcttgcaactctagagtttggagtgggcacttcttcaccgaaataaattgacttttattggttatggtacattattaaacaccagatgctattaattgctagataatgtgtcaggcagacatttttttcctttcctttaatccatgcatggtttccagtaaaccatttctcttttcacctctatcttttgagtccgtcacaaagttgatatgagtaagtttgtgttagaatttatttaaagcagcactgagtacattaatgccattgggttagagaaatgtcacttccttatgattttactacagatttaaacttaaggtcttatgctcccagtaggtttttttttttttttttaacagatacttggtttctcaggacaaggtcttcttccagtactatgccaccctagtagtaaagataactttgattagtggggaaaaagtcttagttgggttgggtgaatcgtctcttcttgaaatctattacatctggccagttttctgcctggattaaaccatgtaacttattttttgctactcagcattctagttcgctacacccagaaagcacctcaggtgtcaaccccaactctcgtggaggctgcaagaaacctaggaagagtgggcaccaagtgttgtacacttcctgaagatcagagactgccttgtgtggaagactatgtgagtcttttaaacaccaacaaagttaacagggctgggttgttatctttagaccctgataaatctaactttcaggagcaaggggggtcctaatacatgcatatgtatgtgtgtggtatctgggtcatggccccccatatctaactgagaaagaaacagtttttaataagtctcacatgtgtagtttcaaagatagataaattgccatgccaatcaaggctggatttctaatggctaactccatatgacagtttttagtgtaccagaaagtggatgtttgtgaaatacttgtgacctttctactctctcttctttagctgtctgcaatcctgaaccgtgtgtgtctgctgcatgagaagaccccagtgagtgagcatgttaccaagtgctgtagtggatccctggtggaaaggcggccatgcttctctgctctgacagttgatgaaacatatgtccccaaagagtttaaagctgagaccttcaccttccactctgatatctgcacacttccagagaaggagaagcagattaagaaacaaacgtgagcaatatttttttattgcatctattttcatactgcatatgtattgatagtgagaactgacaactggacatttttttgttttgatgcagtgattatatattccttagagagaagtgtttagatgttggcatcactgagttgaaagagtgtcaaaattttttgtctctgtgaaaaaattttctattaaaatctttcattcaacttatctttattactgtgggcaaaaaccacagtagaataaaattctagtggaggcccaatagaagacactaaataccagttagtggatatagatagaagaactggtcatggaaatcatacaagtatttattgcaaggtaggaatagttgattgaaaatgttccacgtacatctacacaatggagtactactcagctattaaaaagaatgaatttatgaaattcctagccaaatggatggacctggagggcatcatcctgagtgaggtaacacattcacaaagaaactcacacaatatgtattcactgataagtggatattagccccaaacctaggatacccaagatataagatataatttgctaaacacatgaaactcaaggagaatgaagactgaagtgtggacactatgcccctccttagatttgggaacaaaacacccatggaaggagttacagagacggagtttggagctgagatgaaaggatggaccatgtagagactgccatagccagggatccaccccataatcagcatccaaacgctgacaccattgcatacactagcaagattttattgaaaggacgcagatgtagctgtctcttgtgagactatgccggggcccagcaaacacagaagtggatgctcacagtcagctaatggatggatcatagggctcccaatggaggagctagagaaagtagccaaggagctaaagggacctgcaaccctataggtggaacaacattatgagctaaccagtaccccggagctcttgactctagctgcatatatatcaaaagatggcctagtcggccatcactggaaagagaggcccattggacttgcaaactttatatgccccagtacaggggaataccagggccaaaaagggggagtgggtgggcaggggagtgggggtgggtggatatgggggacttttggtatagcattggaaatgtaaatgagttaaatacctaataaaaaatggaaaaaaaaaaaaaaaaaaaaaaaaaaaaaaaaaaaaaaagaaaatgttccacgaagaagccatgcaggggcaaggcaacgtcatgggtgtgacttttgagaatggagtaagaaacagctggaagtgtacataggaggttcgaaccctgctgaagggagaggttccaatactacaaaatgtagcgggatattgtcatcacctttggggacatgtcatcatggtccccagacagagttacaaaactcatcccctacacagcactatgtctctggtactgtttgttctacagatgtcaacaacagaggcccagccatctcctattgcttggcttgtcagtctttctagcctccccattattaatttcaaatggggcaggtgttaggagggcaaaaatccacatattaagtgcaaagcctttcaggagatttcctgaaactagacaaaacccgtgtgactggcatcgattattctatttgatctagctagtcctagcaaagtgacaactgctactcccctcctacacagccaagattcctaagttggcagtggcatgcttaatcctcaaagccaaagttacttggctccaagatttatagccttaaactgtggcctcacattccttcctatcttactttcctgcactggggtaaatgtctccttgctcttcttgctttctgtcctactgcagggctcttgctgagctggtgaagcacaagcccaaggctacagcggagcaactgaagactgtcatggatgactttgcacagttcctggatacatgttgcaaggctgctgacaaggacacctgcttctcgactgaggtcagaaacgtttttgcattttgacgatgttcagtttccattttctgtgcacgtggtcaggtgtagctctctggaactcacacactgaataactccaccaatctagatgttgttctctacgtaactgtaatagaaactgacttacgtagcttttaatttttattttctgccacactgctgcctattaaatacctattatcactatttggtttcaaatttgtgacacagaagagcatagttagaaatacttgcaaagcctagaatcatgaactcatttaaaccttgccctgaaatgtttctttttgaattgagttattttacacatgaatggacagttaccattatatatctgaatcatttcacattccctcccatggcctaacaacagtttatcttcttattttgggcacaacagatgtcagagagcctgctttaggaattctaagtagaactgtaattaagcaatgcaaggcacgtacgtttactatgtcattgcctatggctatgaagtgcaaatcctaacagtcctgctaatacttttctaacatccatcatttctttgttttcagggtccaaaccttgtcactagatgcaaagacgccttagcctaaacacatcacaaccacaaccttctcaggtaactatacttgggacttaaaaaacataatcataatcatttttcctaaaacgatcaagactgataaccatttgacaagagccatacagacaagcaccagctggcactcttaggtcttcacgtatggtcatcagtttgggttccatttgtagataagaaactgaacatataaaggtctaggttaatgcaatttacacaaaaggagaccaaaccagggagagaaggaaccaaaattaaaaattcaaaccagagcaaaggagttagccctggttttgctctgacttacatgaaccactatgtggagtcctccatgttagcctagtcaagcttatcctctggatgaagttgaaaccatatgaaggaatatttggggggtgggtcaaaacagttgtgtatcaatgattccatgtggtttgacccaatcattctgtgaatccatttcaacagaagatacaacgggttctgtttcataataagtgatccacttccaaatttctgatgtgccccatgctaagctttaacagaatttatcttcttatgacaaagcagcctcctttgaaaatatagccaactgcacacagctatgttgatcaattttgtttataatcttgcagaagagaattttttaaaatagggcaataatggaaggctttggcaaaaaaattgtttctccatatgaaaacaaaaaacttatttttttattcaagcaaagaacctatagacataaggctatttcaaaattatttcagttttagaaagaattgaaagttttgtagcattctgagaagacagctttcatttgtaatcataggtaatatgtaggtcctcagaaatggtgagacccctgactttgacacttggggactctgagggaccagtgatgaagagggcacaacttatatcacacatgcacgagttggggtgagagggtgtcacaacatctatcagtgtgtcatctgcccaccaagtaacagatgtcagctaagactaggtcatgtgtaggctgtctacaccagtgaaaatcgcaaaaagaatctaagaaattccacatttctagaaaataggtttggaaaccgtattccattttacaaaggacacttacatttctctttttgttttccaggctaccctgagaaaaaaagacatgaagactcaggactcatcttttctgttggtgtaaaatcaacaccctaaggaacacaaatttctttaaacatttgacttcttgtctctgtgctgcaattaataaaaaatggaaagaatctactctgtggttcagaactctatcttccaaaggcgcgcttcaccctagcagcctctttggctcagaggaatccctgcctttcctcccttcatctcagcagagaatgtagttccacatgggcaacacaatgaaaataaacgttaatactctcccatcttatgggtggtgaccctagaaaccaatacttcaacattacgagaattctgaatgagagactaaaagcttatgaactgtggctttcctttgtcagtgggactctaagaatgagttggggacaaaagagataggaatggctttaaaggtgactagttgaactgataaagtaaatgaactgaggaaaaaaaatatcactcaagatgacaggctaaaaccttgagaagtcctgctggaagaggaaactgggtgatcgggaggggtgctggattgatgaatctaaagagttgcgtggtcaaagggtcatgttaaaatttagatgctgccttcactgctgggttcttctctctattccaggagccagttgttcatatacactttggtctatgaattttatagacttgtccaagtgctgtgtatgagtttacatacacagtcatttatagcca

SEQ ID NO: 38 - DNA, 20227 bp, Mouse
gggaaagagagagagagagagagagagagagagagagagagagtcagagtttagaaagctaatgttaaactctggcctgtcattgctgtgttcttatctacactttattttgaggacagaaagaagtgcaggtacagtctgaaaatatggtcatactgcgtgtttgttttcccattttctattactaatatattatgggaatctttccattgcattaaatgttactctatgaactaggtttgatcgtagtactcccctccattttatgagtacactatattttctagtgtaagttatttgtttttataatcacatctttaacataaccgctcctaggctctgcgatggctcagtagttaagggcacctttctgctcttccagaggacctgggttcaattttcagtgcccacatggcagctcacaaccatctgtaactctagttccaggggatccaatatcctcttcagacctcttcaggaaacagctatgcacatagcacacaggcatatgttcaaccaaaacactgaaacacataaaagaaatgtttaaagaatgaatttaaaaaaataaaaaataaactcaactacatatgaagccttagcaaacatgtctggacctctagacacacagactctgacacgccaacgtctgagttctagtttcgatacgcactgggaagttttaaaagttttccatcaactctaatgtgtagagaaatggaaactatcatagactctacggcattgagggtgaaggtatgagtgaagcactcttagggtcagaagtatgtcagtgcccatttgttgctgttagcatcatcatcttagggcttgagaggatgttgcagctgacccatgcacctgtgacatacatatggaattattctttggcacataaaattagaatgggagctggctcatcaggttttgtgctgtaagttttctatgttaaaccagatgcgatacactaaataaaataaaatatacttgaccgatggttttgagcgaaataataactggataatcaagaaatatatccactaatgaatagcctgaactactgaaacaatttgttcagtgcctagcatatggtgtgcattttattatttctttcaaaaagaatgtatttggagttacatagtaagtctgctaccttttctttatggctatatctatgtcttatgttgagatgaatgaattattcttcaggggaaataatctatttgaacagtttagatggtgaagaacatttgcagcatttgcaagatttttttccactctgaagtggtctttgtccttgaacataggatacaagtgacccctgctctgttaattattggcaaattgcctaacttcaacgtaaggaaatagagtcatatgtttgctcactgaaggttactagttaacaggcatcccttaaacaggatataaaaggacttcagcaggactgctcgaaacatcccacttccagcactgcctgcggtgaaggaaccagcagccatgaagtggatcacacccgcttccctcatcctcctgctacatttcgctgcgtccaaagcattgcacgaaaatgagtttgggataggtaagatgctttgtgacttgggagctattttcctataacaaaattcttaaaaattcccatatttgcatctccaggtatcttttttttttttttttttttttttttttgagacagggtttctctgtgtagccctggctgtcctggagctcactttgtagaccaggctggcctcgaactcagaaatccgcctgcctctgcctcccgagtgctgggattaaaggtgtgcgccaccacacccggctctccaggtatcttgacttaagcattctatatactgttgaagaccaggtatagatctaagtggtagatagatttagatgtaatgtaattttatgtaagaggcttataaaataacagcagtgttcaacacaatcaattttggatgtgttccatgctcaatttttttttgatattaattatttagtagggtctcatgtctagttccttcgggttgacagaaataacattttcactctcaatctttttaaaagtgctaattgttcgactctctggaaagcctaatgtgaacaggccgactgtagcataattatgtccaaagctactaaatgaagccattttgaatattatactgtgagggagccaagtagtaaggggacctgaaagatgagtattagtactaagtctgcaactgatcattctggttaactttgttccttaatttttcagtgtccccaagtgtaaaattaagatgtctggacaggtggttcctaacaacttggcagttctaagacttcatggcttgggtttaaattccacaacgattgctttcccggttaaaatcctcacttgtccaagtctgttttcctttcagcttccacgttagattcctcccagtgcgtgacggagaagaatgtgcttagcatgtaagtttcgcttccatcaatgtgctgcagaaatggcgtgcagagataagtctaggcaaccgaatgtgaggtttgaaattacaggagcaaattgggcagctttaaggctttgcttgtgctgaatatcacactgataagcaacatgtttaacttcggtcaacgctttagatcttagccttgacattgactggagttccagaaagcaagccaaatcagattttcaaaactgaagaattaatttctctgcagctttgtatgggctcaggagcgtgtcttgtcagaaccaataggaagatattgcgatatcctctattttgtaagctctttaatatcaagtcataggaagtaaaatattcttagtttagttattgtggagaatattttattcctttaaatattgtctctgttctacttctttgacatttatagtaaggaatttaaacgtgtgtcactggtaatgtctgcatgtagaaagctggacacggatcactttgagtcaatcggacactagtgcaatctaggattggggctcagtcacgctgggagcaaatataactgaaggtccagtgaccttcatctttgcttaaattaagtaagaaaaatagtgtgaaaaatgtgggccttcccaggtatagatgctcagtgagcagtgaccccaaaagaggaagtatatttgggggaaatctatttattttgacttttaagacttgcacctgtatttatgggtgaagatgacagaaagaaggctagcatttccctctgagtgactcgaacccagtttcccgtagatctttagcaaagggctccttctaaacagatcagagcagaggaagctgtacttgaaaggcacgcgtgactgggtctcagcctcaagccgctctgcatgtggtctccttgcagagctaccatcacctttacccagtttgttccggaagccaccgaggaggaagtgaacaaaatgactagcgatgtgttggctgcaatgaagaaaaactctggcgatgggtgtttagaaagccaggtgagtgattagagagaaagccacattgacacttaaccaaaatttaggctgcagaaagatgtcaggaagttgtgggtttaattatctgaaaactgttttctggaagtagggttcgattagttctggaatcccgccgaacagcactgttgaagcagagcaagcggctgcttaaaggagctgagattaatacgagactcagagctaaggctccggagtaacgctatctgagcaaccacaaacacattctcttctttgagcttccatacctgcaattatggagtgacattagatccactcagagctgtcacggaggtttatgttgatgacgagtggcagtatattgcctcttatgcagacattgtggctgacagcattctagggatcactgcaaacacactgataatcaaaacgctgcatggaaggtgacacccgcagaaaatctgtccagtcaactaagagaaattggctgcagcgtatcatcagaattcctatcttatttataaatgttaatttattaaattataatatttatattttatacatatattacagtttacatactatgttatattatatatggagacatagtacatattatattgtatattatatattacatattatattatatatgaacaatccatatttgtcatgtagttataattttatatagtgttatatcacattatacaataataatttaattaattgacagattaattaaatctctatgataatcctggaaagttgaggacaattttctcatggaggaaacttaggaacagggaaatcactcctttggagaattatagtttggtagacctgaggattaaatgaagtcttctggctccagaattaggtccttagcaaggtgctcacactgttcagaacagcacggtgagtgtgaggcctgcagcaggttattcgagttgctggatatagcacgtacgcagacaggaacatcagtgtctgatatccaagtaagtcagaacttgagaaaaacaagcacgtttacacacccagttgccctggtatagaaacaaaatagctaccattctgtagtttactcctgtatggaaatgtgctttatacttgttggagggatttaagtatggaatacatacagcagagcatgggcacagggccttccgacggtgcatatgccaagggccgcaccctaaagaaagccactctttaccttccagcagccagcaactgcccgtcactcctcggcaaggacccagggtttgtgagcccttctccatccacacaggcgttttgtgtacaattgccttgttatgtatgaaaagtttttgcttcaatcttcctgcagtctctggcccttaaaatcctttctcccttcttctccaatggaccctgattcttgaggggagagagagagcctttcctttctgtagacatcccatttggggctgagcacatcatggctacttatcctctgtattttggccagttttgaacctctgcatccattaccatcccctgcaaatagagcctcctgggatgaagactggggctgcacaaagttctgccactctgtgtttagaaggcactctagtattatgcccattcagtaaaacaaatagagataggttcactcttagggcctataccatactcagccatgggttcttggcccagcttgcagtgccaggcctgagtgccaccctgtcagagagtactgtttgtcactctcaggaatctatgtcactgttgtatcaatggctataccttagccaggctgactgtagctcttagggtttacagctggggtaaccccgtagatgacatcacatgacttttctccccctagcggtttgcacatgcccttctggaattatgaaatctagccagtaagaaggcaacctcagacgcttctggctctagaatttatgggttaataagaatctccggtttgtatgttagtttcagtcactctttgttagtcagttaaaaaggcgtgtataaattatgcccaaagcacttcttattgcgcctttcgtattcagttagtgttcagggtaatgttgcaaatggggtggctcgtcactacaagttcaaaaggtttcttttaaaaggttgactgattctgtagccagaagatggcctagtcggccatcattgggaagacaggccccttggttttgcaaactttatagcctcagtacaggggaccgccagggccaagaagtgggagtgtgtgggtaggggagtgggggggggagggtatggggaacttttgggatagcatttgaaatgtaaatgaagaaaatacctaattttaaaaaagacaataataaaacaaacaaacaaacaaaacccaaccaaccaaccaaataaaaaaaggttgcgtgaaacaaacatggcggtgcaccactatggtctcagggcttgggaggctgaggtaagtggatctgagtttggggcgagtcttgtttccatcgtgagtttcaggctagccgtgacttcatcaggaagaaaccctatctcatcctcgtagagaatatcacaaaccaaaaatgaatatagagaatgagtcttcagtaagcctgttgtaatagttaaataaagcgattcctaaggtgggtgacttccttcaaaatactggtcctgtccaaatctcagtgaatttaggtgctaaggaagaaagcattttaaaataccgtagctaaatctgtaattatgactaatgaagggtggttctatatttgaagttcctcttatttttaactaaaaataatattcatttattttactattgtcatgttgttagaaggccaaaaggaatgtgtatctataaaacaatgattatataaaaagaggaaaatttctattatcttggggccaaacttttcatgaaataaaagagtgaaattcacttaacctaaaacaagataggaaagataaatcagtgcataacctttttacttttaaaataattatatctcccacacagaatgtgtgctaccaacagatataagtttaaagcccttcaccctaaaagctaccaaagaaactcctcccatcagactgagaggaaatacactgaacgcgtatggggatctgtcctaatttactggtctcattttggacactaggaacctttacacactagttcccgtggagttagatagtcgcctttcattaacaataaaagattttcttttctcagctatctgtgtttctggatgaaatttgtcatgagacggaactctctaacaagtatggactctcaggctgctgcagccaaagtggagtggaaagacatcagtgtctgctggcacgcaagaagactgctccggcctctgtcccacccttccagtttccagaacctgccgagagttgcaaagcacatgaagaaaacagggcagtgttcatgaacaggtaaggaccatccttgggcatccagtgggcagccagtgtttctgcagtccacatgtgcactccaaagtgtatacaagtagggaatatagccagagtatgtctgctgaggtctgtgcaggggcttttgttagacacacactgtgagatgcagaacacaccgcatgcagactcagcctctgatccgtcagcctccggaaacatagctctttctcacctttaatgttttgatttttgctatgcacaaaagtgcatcaggatcgcaaagaatgactcctgagagccaagtgttcatgtacacccacgaaactgataattaagaccatgcagtcagcttctgggataaatgtgcttgtcacaaatgcttgcgggctttgatatcaccctctacccttcctttcacctttaaaatagttcattttatttttgaaacaaggtcctagaggaccaggttggtcttgaactaagtatgcattaagggtgggtttgagcttcttatcctcctgtctctaccttacaggtgccaaggggacaggcatatacatacatgcatacatacaacatatatttacatgtctatctgtctatactgatagacatactgagagacagagacagagaggacaccttagggtagtcatcgaactcttcactgataaagatttgagctgtcttacgtagaagctagcctggctgattccctgatatgtctgacaggcttactgaaaaagacatctcagaaggaatcatagcgtcattgtttgttttcataaaagactctggattaacggattggatcttttttttctcctgaggctgacatgtaggaacgttttgacagcttttgaaaaaagcctgcacattttcccgtaacagcacagtagagaaaaagtccattggaccctgttgcctttgtggttggttaccccattcattaaataaattccagagcttagttcagggaggtggcagtcccttcatctgttacatgtttgcaaatctccaagtgttgtccattccacaggttcatctatgaagtgtcaaggaggaaccccttcatgtatgccccagccattctgtccttggctgctcagtacgacaaggtcgttctggcatgctgcaaagctgacaacaaggaggagtgcttccagacaaaggtggtatctttgtgaagctatctgaagctaaatggggtttagccatggcttgggaaaacagaattaaaggcagaaatgtgcctcctgtgggaaataccatcttctttctcatcctagatgaaagtcatttttacttgatcttttcaattatcgatgaaatttcattttctatttatagttagaaacaatactccataatagtaaggtataactttaggccgaagtaaaaatgtatttggatcagcatttactgaatctttaaagagagcagagataacagcaatgcatgtacccagaggaggtgatttagtgcttataagcccattagagtgataggattgtccctctctccttcagagcagaaaacaatgttgatacagagtaaccagcctttcggtaattgacaagtggaaaacatactacaagttcaaccagagccaaggaagctggaaattagtggggttgctaatgtgtccgcaaaatggagcatattccccacttctggcttgttttattttgccttttgaggcagactcttgttatatagccccaactgggcccaaactcctaagaattatgacggtagtgcaattctttttttttttttttcttgtcttttcctttctttttaactgagcaggagccaacaggctttaccccacctggagactggacaggtgcagctgtccatgtggtcccagtatcaaaatgatgacgtattggtttgaagatgtttaagagatctcaggcatgcatacataagaattaatctaaaagtcatgaaaatagaatgacatgcctaaacgtcctgagctctaagtttagtagaagctattttatactttcctgtgtcatctgtactgagcgtttctagttcttagatctgaagagagaatgaatgggttttctaaacacctcacttcttctgcatctagagagcatccattgcaaaggaattaagagaaggaagcatgttaaatgagcatgtatgttcagtgataagaaaatttggatcccgaaacctccaggcaacgtaagtataagcgtctaaggaggcaatgtgatgtgctcaatgtcaatgtcactcctccagagtaaagcctcctttgggaggcagactctgattagaatcatgagatctaaggatcagaacagaactagcagatcagcctgctatttatgaaagtctcactggcatggtattcaaggaagagtttttaagtaagtttttattgtttgttctagacacttcagtttctgtccacactcaaattatactgccccattagaccatatttccccagctcttctacaaagtagatcaagctttatggagaggcatctccgacttgcagcctaataagaaatccttcttgttaaccaggcttcccaatcaaccccattgtgtcaattgttgtttctcggtaaaatattcccctgaggcaacaactttagaagtcagtgacaggtgggcagaggtccttagtgcctggaagcctaggtattgtgcacagccaagatccaatgcacatttcagccctgtagtttcttccaaagactggtttcacctttcttctggaagaggtcagacttatgctacaattacctcccaattctattagaaacttagtcatcaattcatatggcgccttaaatatttgtcttaatagtaaaatagaaatgggaggacacaatgacagcaatggcatcatgtatctgttagcaagaaaagccacacacgccacaatgattcccaagttatcagtaacaaagactcaatcctttattcaaggaagcagggtctttgcacaggcacctcttcccatgaattctggcagctttgttttatacttccttctgctgtggtctgatgccttgaagcagaatctggtagttcaggctggacttgagctcccgattctcctgcctccacttctggtttgctggaattgtagccgagtgcttctgtgtctgcaacaaacgctcaggatcagggctcaacaagaaagggcgacatttagcttgagttcctagaaagtcttcaggaagctacaaatgacttccaaattacttgagcacccagtcccccagtctacagagcttgtgcctggtggagcagaagctgacgagacctaagatgtgtttccgtctcttttaaaagaacacatttctgttctttcccgctggaggtaactccccagatcctctacagacaatgcgatttcatcctgataaacaagataatttttttttaaatgatcctcttccagaaccattattaagctaagtcaaaagttaactgaagcaaattttactgagattcagaagctggccctggatgtggctcacatccacgaggagtgttgccaaggaaactcgctggagtgtctgcaggatggggtaggagtctccctctctccctttttgtctcaattaatgtttcactatgcctggcttggctggggtgcagtgaacttacagactttcgaagagtaaaatttgagctacgtcatgattgctttggggtctcacctcaggcattagcaatatctgatccctttcatgagactacgagacattcagttcttatttgactgagagactgagtctctcccactagctagctagctgctggtttacagtgagggccacttgccgggaaaacttataaactgacatcaaagaatgtatagtttaactggagagataaaacaattggccttcttgaagttatagactgtcttttgtttaccattgtctctacagggcaatgtgtggcacattgaagggttctgtcatagtttaatgacagacttataagtaaaaataatgcaagaaactgttgcaagagagaaaatgtctatttattactaagcagaggtataaataaagggatctaaaagaattaaattcctttatttaacagattatataagaactggtgatatagatgatgtggctaatttgggttaactctgagctttctagatattgaatgagaggcctgtatataccaaattactcctcctttcatccctgtgacaccaaggactaccttttttttttttttttaaatctctcttgttaaaggctcaaatgatgttggaaaaagggacagaaaagactcacttcaatatactcagtgtcattcgttctttgtagaggtagtcagggaagtcagcaggtgacagggctcccagggggcagactggatcctccaggacagatggcacccctgctgtgaggagtggtgaatcctgaagcacggacttgattactttttccctcatgcacattaggaattcatcagccccttaggagtactggcaaaaaacgattttgtttttctttgaggtcagttttcttggtttgtaattgacaattttattgattttatttttctagttaaaaaaatagcttttaacttttggagcttgtcgctattttttcattgagagtggaaaaataatttcagtgctttacaggaaggctttaacaactgaataatagctttcaagggtcactgtaagaatgcacatccctgagcagagacaacgtggtgtacaggattttgcacagccagttcgtcttctagagtgccctctggcgggcagagtgggtcactgcagatccctctgatcaagatggaaggaagggaaagctagcaaggttagaatgtcagaggtgaatattgcacattggaacgtttcaataacagtaaaaagctgctgtcttgtttaaacaacacatttccttctcatcttgaagacgtttactaaaatagaaggcaggacttagatgaaagctgtgcgaagaggactcgaacaagtcggaaagcaatgaggaagagcaaaaatgagcaaaataaaaagggaaagataggtaaaaacagaagagtgatgaggcgagatatctcattgaccctgatcctccttttcatctcgccattgatttcttctcccacttcctttccgggctctaagttcctaccttagaggataaacctttgagatttatattacatattattatattgtattatattatatattatattatttactttacccattgcaggaaaaagtcatgacatatatatgttctcaacaaaatattctgtcaagcaaaatagcagagtgctgcaaattacccatgatccaactaggcttctgcataattcacgcagagaatggcgtcaaacctgaaggcttatctctaaatccaagccagtttttgggagacagaaattttgcccaattttcttcagaggaaaaaatcatgttcatggcaaggtaacatgccctgtaaatgtatatttgcaatgataaagaccatgaagtgatggggggtgggggctatagttttttagctcaactgaggctggctgtctagatgccgtgacacccaggagatgtaagcatagaacttgtagctaggaatgagatctactgtaacgtgatgaagttcccacaattaccactattaattggctggcttatgaatctatattttgttttatgccattctgtttcaatatctcatatgaaaaccaccacgaactttcaaagataatttgtatattttgtaataaggagggcataggctgccaagttggctcagtcagtgggtaagcaccacacaaactcgactacctaagttcaactcaaggaaactgatgtggagtgattgagccaatttctaaaagtggtccttgacaacacgtgcgtgctgtggcaaacatgccccctctagtagtaatagataaataaaattaaatttaaaaataagaagtgctcaagctcatgaatataatgatacacactataatacacacttcagaaaaaaataaacattcccctaaatatagctcaatagatagtgccagataacagttctttcactgaaacagattgcttgatatgtatagaatttttaagaaatgaaaacctgtttagagacatttgtacaaaagaagttttctgtactatagtcagcaggcatgtattcattctattggcctttaagggaagccaacagtcaagttaacaccttcccctttcttggatgtttctatgcactctattagaagagagatttgtgcagctcttaggacctcatgcctaatgggttccgagggcttttcctaagctaagcgcctgatgctaatgcagcaatcaaagtaatggctcaatcttctcgccagtattcccaaaagctgtggctctttggctgcactaaaatcaggtattcacatgtcatttgtactgctaaataaagttaggcaaactaaaacaaagactagatttaggaggaacatctaggtgttttgttggtggtagaagtcaagactacctacatctacaaacttagagcacaattcatcttaaagagtgatctctacacttacatatgcatacacatataaaagagctaacagttggcttcatagcaacaggccttcagtggagagaatgtttgcaggagacattttctcagctgagaacaggcttccaccaagcctgtatccccctctgttactcacaagtctgctgccctagccctcagtcaaaggagctgttcttgaccgcaagctgaattagtgtcccttcgtctttgggtgtcgcctcttttcctgccctcgtctttcttatttttcttcattgatttatcactatcaaagagagatgacccatttaagcttgcgtctgtctccttaagagaggggaggggaggtcttttctcttacatggcattagctcttcactgtttaaagcataccgtacactctgaaagcatatttgttggataaatgaatggaaatcttgccactgaaaagccatagcgagacacaaaacaaaggggtatatttgtattgttcttctttaattaaaaataatttcacatgcatgcatgcatacataagtttatacctaggttctgtatatgagagaaaacatgcagtttgtctgagcctggcttattcacttaatgacttccagttccatgtattttctggcaaatgtcatgatttcaggaaaggacattttactgggtgatttgagggactgccttaatagttttgctgttcacagaattcaaattatgtttgcttttctgcttcacttactgtttgacttttaatgtctgtatgctctgactgctatataggaatgcttagggagttagttaatagtgtaacgttgtcttagttctaacaacatgatatttttcctacatatttaagctttcttcatgaatactcaagaactcaccccaaccttcctgtctcagtcattctaagaattgctaaaacgtaccaggaaatattggagaagtgttcccagtctggaaatctacctggatgtcaggacaatctggtaggtggtactagaatttgggggataatctgtaaactgcattgatagtagtctttggaaatacagtttgtaggccagtgagtgagaaggctcagtaggtaaaggcgcctgttgtgcgagcctggggacctgagccggatccttgggtaccatgtaaagggagaagaaaaagaactgcactccacagagttggagtaggacccacacatgccctttggcagtgctccccactggataatgaaaaaaaattaaacatactagttaagtagtaattagctagttatacttagctagttataaactagtagtctcaaaattaatgagttatcctaactagcaaccaatggcttatgtaagaaataaaaatgttagttaaaagcattatggtgaatagaatagagatgctattcacctttgccagcttcaggaaggcaaaatctcctgtccagtggctatatcctcaagagttcatttgttttcattcttaaaagtcacgcattatcatcttcaatatttcataaaggcttctaagattggttttataatataataagatcctggcatatagaaaattgtgtgtctgagacgaaagaataatgcatgtaataatgtcggtatttttaggaagaagaattgcagaaacacatcgaggagagccaggcactgtccaagcaaagctgcgctctctaccagaccttaggagactacaaattacaaaatctgtatgttttttttgaaatgttttcagtaaattaaaattattaataggtgaaggaagcataaatttaaagtctcaaggcaccaggcactgctactctttcttctattcccaattggatcaaagtcagtataaatgtgactacgtgatttctccaaagttatcccccattaaatattaacaagaacagcccatgaagtctgatgttttaaattgacttcgggttccccaaaccctgtagatttttgcagaagagctatccattctgctcttgatctgtcaaggttccaacacccaaagtacacggttgaaatcaaggaagagctaaggttgggaggaaagcagtcttcttcccacgtagtgacacgtgagagagatggaggtggggtatgtggagtgattggcagaataaacacttctcattgtggggccacatgactcatgccttctgacaccggaagtaggtcctagagaaggaggaaggggtgaacactcacgatgacgaggtaaaaatgtttcttcaaggttccttattggttacacgaggaaagcccctcagctgacctcagcagagctgatcgacctcaccgggaagatggtgagcattgcctccacgtgctgccagctcagcgaggagaaatggtccggctgtggtgagggaatggtgagtggagaactgtgtggaggtggtgttccttggtttcttcagtaagttcaggtggagggtgtgtgggagacctgtctctcagtggtttgcctttggccaggcgttctgtccttctcaaatggttaggggcaaacacagagggattattcaacaatgtaaaggcaaactttatacataggaagaataacacccaacatattatccaacttattgcttcttattctctaaattctcactcttatattggaaagtaaaagaaaaaaaaaagaaaaattcacttctaagagattgcaattagtcatcttattttagccacacttaagagttctgcattttgcagaccagtcgaatcattatagtgctatttggggtagtttgttcccaagcaaagtacaggagtaagattcgtgctctggatagtcacccccttaatcttcacgtcacactgagaggggagcttctgccactaagcttgaactgtttgcatttgacatttgagaataaaaaaaaaaataccaatttgtagagtgacttgtcttagattagggaatccaaggatgcacccagtcatagctcgagagtcgtaagctcacaagcaccacaacaatcattaagatttataacttggtgtttataacttggttatctttgaagtatgggggattgggaggatctatatgaaaaggatctatatgaaagctttaagcacacacacatttattttctactagttttgtgtgtgtgtatacgtgtatatatagaaagttgcaaaggtagattttccctattctagctttcagaaaggagttctctgtatcaaaatgcaaatgcaggggttgaagggatggcttaggcagttaaaagaatgtcctgctcttgttgaggaccggagtttggaccttcgcacccactgaaaatgtctctcaaacacctattactccagttccatagagaggtgatgtctctggcttccacaggtacccaactctcatctgtacataccagcccctagttatacataatttaaaataacatagatatttaaacaaaagcaaaactcaaccagatacacacagaaaatgagctcaaaaaattgatttctactcataaagatggaaatggtttttcccttttgaaagtctgtctacaatcagaagcatatttcaaaaagctaaaggtcttttcacaacaccacatctgccaacatctatcattacacactaagttttatcccaagcaaatgggtaaacagcacagtccttaacaaatcgttactaaggtgatagtacagcatagaaaagtttcccgtagcattagtgataagctcctagactttgggagccaccgcatgaaatttctgaaaacgtgagccaacttcggtggctaattttgtctgcctgcttccttctttttcattctttttaaccaggccgacattttcattggacatttgtgtataaggaatgaagcaagccctgtgaactctggtatcagccactgctgcaactcttcgtattccaacaggaggctatgcatcaccagttttctgagggatgaaacctatgcccctcccccattctctgaggataaattcatcttccacaaggatctgtgccaagctcagggcaaagccctacagaccatgaaacaagagtaagacattgttattttgagctgagactcctgccttacatgttgagaacttctgggttcagtagaacattgctgcccttgaaatactcaacactatctttaaaattagttctgtttcagtttttacacagccttatgtgggaagttagtttgaaaaaaatccacggaggcagacaattttctggttatgaaaaattctctctgtcataacaattgcaatatatttgtgagtaggaggaaaatggacaatatatttagaaaaattagaaaagatctttgtagtgagtcaggatacttctaatgataggaaatgagtgattgcatctataagcagtataattatacctgactcaactatgttgttgttttaaaaaaaggaaataaacacacattcgcgaggggagacattctgtaatggtaatggggtgaagccaggggaacttatattcttaaatatccatgtattttaatttaaatgaaatgctcactggctttgtacatgagcttcctgcattgggagatctattctcccagttttcttcaccccaggcagaggcgagtttcaagagataataagaatggtacttcctttcccaagcttgcttatggccttgccaaatttaaacccaacacatgatcaccgatcaccgctaagagagtattacaggcagccagtgctccttcggttaagctatgatgctggcgggtgtcagcatcttgacatctgggcttgtgggtatgcctaaccgcactgcagaggagccaagaggcaaggataatgtaggtaatcaagacagagagcacagttccctctccataaaggcacacagagtcctgacatagtgattcctctgtaacctgcaccagggcaggccagcggcgtggtgtgcttcaggctgagaagtgtaagggctaaccttggcacggagcggaaggagaggcagctgaggatggctgctagggttctgaaaacgctctactaaacgttctgggaaggtgcggctttctttgcatggcagactcgcctgtattttcttttgttctaaaccccaggcttctcattaacctggtgaagcaaaagcctgaactgacagaggagcagctggcggctgtcactgcagatttctcgggccttttggagaagtgctgcaaagcccaggaccaggaagtctgtttcacagaagaggtgtgtatgaacatctcattccctaaagtctcggtgtggtgcatcctgcagtaaagaacagaaatacggtcctacaaatccgaaacttaaaataatgaccaatttatttatttatttatttgaaaatcttatggggtttaaaaactaatatttttctaagtactagagagaattaaaaatttattctatattaagagaatcagtaatttttatttatttcctaataggataattaaatatataaggaattaatggtaacatagactgtttctgagctaaagttaattgattttcatgaagtggattaaaggaattcactagttagtgtgtattgattaaatgatcaagatatttgaagaatatttgtaggaaatactcctgacctcacttaagagcgagcacactgacagtggggataagaaaatgtctgagttgctgtctgactggcacagtcctctgtctctttatctcagcatctgtgtatgttcttcacttccagggtccaaagttgatttccaaaactcgtgatgctttgggcgtttaaacatctccaggtaagaaaaaaatgcagcccaggctcaaatgttgattctctcgatcaatcaatatagtgatgattctaagaagtatcatcaatattccttaaaatgaatataatgtaataaagaagaaggtttatttttaagtcactaaaaattttggggagatttaagaagcttcagaaaatgccatcagaaggttttctacttaattagtaatataaactattttctttttatattgcagaaggaagagtggacaaaaaaatgtgttgactctttggtgtgagccttttggcttaactgtaactgctagtactttaaccacatggtgaagatgtccatgtgagatttctataccttaggaataaaaacttttcaactatttctcttctcctagtctgctttttttttattaaaaaatacttttttccatttatttatttttttattcactttacgtctggatcgaagtccctgccagtccctactttatgcagtccctctccccactcaccattccacttctcctctgagaatgagaagcctctcccccatccctgtgtcaggtaccaactcaccctagcacatcatgtccctgcatgtctgggtacatccttctcacagaggccagacaaagagcccaggtaggggaacaagatccacaggcaggcaacagagtcagggacagtccctactccagttgttgggagacctgcatgaagaccaagctgcatatctgctacatatgtgtagggggcctaggtccagcccatgtatgctctttggttgctggttcagtctctggggagcccccaagggtccatgttagttgccctgttggtcttcctgtggaattccgattcctttcagggtcctcattccttcccccaaactctttcacaagactccctgagctctgtctaaattttggctgtgggtctctgcatctgtttttattagctgctgggtggaacttcccagaggacagttctgcgttgctcctgtctgtttagaaagaaagaaagaaagaaagaa

SEQ ID NO: 39 - DNA, 5849 bp, Mouse
tggtgctgaccgattccaacctcagggtttctccctcctcattcagcaggagtggtcatccagctggcgaggagggggtgcgggggtgcagaggggctctttcccccagaaaacaagctggaaagccagaaagcattataaaaattgaccaggaaggaccgaagaaaaggcccggggagcaggagaaggggacagatgcaagggggtggcagaggttgaggtgggggatggagaggcaggcaatctggttcaaacttagctgtttctacatatctggtctatggactcagaccccaacctgtccagacacagtataatctacaggaaggacagtggttctctcttccttgctgttcccatagctactagaaggtgtctagcaaatactggttaaatctatgtgctcttgggttggctgtgttctcagctggtaaagtggtctgcctgaggagtatgaggccttgggtttggtcctcagcaccctgtaacctgaaagtgatggagtctcatgcctgggatcccagcacttcaaaagtgggacgggaagatcaggagttgaaggccatcctcagctacatggaaagttcaagaccagcccgagctacatgagaccctgtctcaaaaaagaaggaggaggaggaggaggaggaggaggtaaatggtaggtgtccagacatagggatacctcttctacataatcacaaaggccccgataaagcctccagggaatgagttgaatgaggacatgtgtacccacgcgtttgaggatatgtatttccacggttccctatggagccacagcagtgtcttggaaccatggggccggagcagaaaaaccaagagacctgccctcaggttcgtgtttctcttctttttgagctcccaattttctttccccaggattcctggggttctaggactgcccccagacttaagctggcgacatgccacaaaatcttcaccctagtgaacccctcttctgtctgtgtaaatggagtttgtttgtttgtttgtttgtttgtttgttttcgagataaggtttctctgtgtagccctggctgtcctggaactcactctgtagcccaggctggcctcgaactcagaaattcgcctgcctctgcctcccaagtgctgggataaaggcgtgcgccaccacgcccggaataaacggatatttaaaacgccattttttgccctgaaaacagacactcaggggctaacaccacctgctatcctttgtgcaccccttagttatccactccctgtgtcggtgaggatggcaggtatgctgagggcgtgtgcagaagtggagaagggctgcgacctgttaggtcacaggaatcccgatcctggcgcccccggctccggtggctggggcgtggcctgctgggggaggtccctacctcctcccgcggcgatataacaacaggtcgaggactgccaccctccgcggcggaactcctgttctggtctctcgcttcgctctcctctccagacaagatgagcttcacaactcgctccaccaccttctccaccaactaccggtccctgggctctgtgcgaactcccagccagcgggtccggcctgccagcagcgcagccagcgtctatgcaggtgctgggggctccgggtcccggatatccgtgtcccgctctgtctggggtggctctgtggggtccgcaggcctggcgggaatgggtggaatccagaccgagaaggagaccatgcaagacctgaacgatcgcctggccagctacctagacaaggtgaagagcctggaaactgagaacaggagactggagagcaaaatccgggaacatctggagaagaaggggccccagggcgtcagagactggggccactacttcaagatcatcgaagacctgagggctcaggtaaggggcctaaggggggaggggcagtagctccgggctgttctgtctatccagtgtgcccacacccccaaacttgaatagagtgtgggctgttgactccctccactctttccacattcaccacatccccccacacacactctatgggacggagttaggaatactctggactctcacccacaacctgtaggaattccaagcgtagtggttacacacgcgagccggcttcccccaagcagtgtagtgggaagagaacaggattggaaaaaaaataaaataaaaaggtgtgtgtgggggaatcataaaatgaactcagacactcacttcttttccagtaggaacagttagagggttaagcggatgtggctaaggctgagtcatctaggagtaaacaggagcttacctgtaggaggggccagcgggacaagtggggggggggggcgcgtcccaggacgggggggggggggggggttagcaggtgcacctggagaagatgccaggagaggatcagagaaatcttgttggaagctgctcttttgtaagcaatccagatagtgcaggccctggcagaggggcaaggaatccaggaagggagaggaggctcaggtgggaagggaagacagaaatacacgcctctgactgttcctgggactgggatggattcactgaaacacaagacgtgttttctcatcccccacttctccacacacacacacacacacacacacacacacacaccctcatgtgacccggaactctcaaagcgactctctccactttaatccacccagatctttgcgaattctgtggacaatgcccgcatcgtcttgcagatcgacaatgcccgccttgccgccgatgactttagagtcaagtaagtccggggctgcagctggagctaagaatggcctactcccagaactgtattagagtagggttccttcctttccgaagtttattcaggttagggttcattgactactgagttagctcttcatctgtgcagcccagtttaagcaaacgctccaaggccaagaatcgtgctaagggaatgactccgtgactgtttatggtgggcacggggctagtctatggaggtggcactggttgagaaggttcaggccctctgatcacctccactccttcaggtatgagacagaactagccatgcgccagtctgtggagagcgacatccatggactccgcaaggtggtagatgacaccaacatcacaaggctgcagctggagacagaaatcgaggcactcaaggaagaacttctgttcatgaagaagaatcatgaagaggtaagccgggccactgaccaggcctaggagctaagggccaagactaggcgggccaggctgcccccaaagcagcctagcatggaagcagaagccccggctgttagcctgttttgattaagagcagagccattggctcacacatgttctatggctcacctaagttacactattgagagtcaagataacattaagccagttaaggcctggcttgtgcatcactacctcctggaaagctgagacaggaggattgagttcaatgccatcctgtcttagtctagtaaaacagagattgtgtgagtaagaccctgagttggaggcaaaggtggggactgccagtcttaggagctggtgctcatgtgggccttctggaagaagcttaaggtaagatctgtggaaggaaaaagcagctacaacgaggagaggatatcaccagcgagtggcaggttcaggctgtcaaggagtggcattcccaaccagctggagcagaagcccagtcttaggcttgccaagggtttcctctgctctcttctgcctttacactcaacatcaccttctagaaaaggccatcagtaatgaaaggctgggctgaactgactttaagtgtcacctgccacccccctttatttctgccttctttaggaagtccaaggtctggaagcccagattgccagctctggattgactgtggaagtggatgcccccaaatctcaggacctcagcaagatcatggcggacatccgcgcccagtatgaagcgctggctcagaagaaccgcgaggaactggacaagtactggtctcagcaggtacaaactaggaaaggctagctgcccgcccccactccgcttaaggtaagctctgtgtgaaggggaggtgccaaggacagcaggtcatgactgaccctcctcacccttcagattgaggagagtaccacagttgtcaccaccaagtctgccgaaatcagggacgctgagaccacactcacggagctgagacgcaccctccagaccttggagattgacttggactccatgaaaaaccaggtgagcatcctccagtcacctgctgcagttctgctaggcccagacctcagacacttggtggccccagccccaactgtctcacccctaagcctgctccacacccccattcccaatcaagcgattccctaagatgaatcacttctatttgatttttttttccattgctcccacactgtagcctagcatttgatagacaagaggcatcaagaccctttcaaagaagggttgagcaggctaagagtagagactcactctcccatctctgtgtcctgcagaacatcaacttggagaacagcctcggggatgtggaggcccgatacaaggcacagatggagcagctcaatggggtccttctgcatctggagtcagagctggcacaaactcgggcagagggccagcgccaggcccaggaatatgaagccctcttgaacatcaaggtgaagcttgaggcagagattgccacctaccgccgcttgctggaggatggagaagatttcaggtgagtggtaccctgctaaccacacaagtgaggggcttttctccactcccggagctttgggaagtgccaaggtctgtttgttggtaaccactcaccagtggcctcaagtgagtgagttatgggctccctcccgtgagaaaagaatgattacatattatccctggctgtccatgggatggcaccgagtgcctcttttctggaagaaatggctgaggagactttgggggggtaaggaagggcctcagggaacccttcttccacatactctgtctcccctctattctgggctgtttataactaaggcttggtcatctgttacagtctcaacgatgccctggactccagcaactccatgcaaactgtgcagaagacaactacccgtaagatcgtggatggcagagtggtgtccgagactaatgacaccagagttctgaggcactgaggcagagaaggagggaacccctgggaactgagggaccaataaaagttgagagctcactggacatcactttgtgtcttccttggcagtcttcctgcttgcgcacacaaacattaggcaggagtctcttgaccctagagtttcacacgactggcctgtgggagaggaaaagtctgggttcttgagacatctaggagacgaagtaggagatatgactgtcctaggtggaggtgaaagtgtaataaaattagaacctcccattcaagagacctggtgaagaagccagtggtggtgatgtacacacatggtttaggttgaagcagaaggatcgtgagttcaaggctggtctgggctagatagcaagttccagggcaacctgcatcacatgcaaatatcctgctaaaacaagagctgggtatggttgtgcgcttctaaaatctctgagcttggtagtggcgagaggatcaagaatttgaggtgatcatctgctacatagcaaatctgaaaccagcctgggctacatgagaccttgtctcataagggagtctaggaagggacttggggaagccaagcatgttgacacaggcctataatcccagcacctgggaaagaaacagaagcaggaacatcttgagttcaaagccagtctacagcaccctctctgaagaa

SEQ ID NO: 40 - DNA, 166231 bp, Mouse
cctagtagagctgcgggtggtggtggcccagactctcttaggaatgaggcaactcaggttgcgcaaccttccctaccggaggtttagtctagtccttcaggaaaagcctctggtcccatttaggagccattttatcacgggtatctggcaggttctattgaggctatttttcaaacctgcagtatttacagggacaagactgggctgctccggggaggccgggacgacttcagccttccagttaatggatgcataattgaggaacaacgtggaattagtgtcatcgtaaatgatctagtgtctcaagttaatttcacccgttttttgttccaagaacattcgagtcagtcatcttggctagccggcttccaccaaaaagatttgttttccatccagcgtttcagacctagagttcaagttcttggcccttacaagttgcaggagcgtgtctcacgccttggcttttttttttttttttttttttttttttaaggtaacatgttattccttgttttgcttctaggaagcagagggttgaggaaatggcttgggcgggtgcattaatgcagccgaaaaagacacagactccctcccttgggacccgcgcggccccgcgctctttccgaaggtgcctggcaaggcgtccggttccctcggacgctccgggtccaagtgccttaagcggagggtctctggcgccttccttcgctgtctggcaacagtctggcggggtcagggaccggcgggaccgctcgggagagggctcgactgcgcctcgttcctcggtgccagggacaccgtcgcgggaggcgcggccagcttccctaggataagacttcccgccccgggggcagggcggtgcacttagacggtcccctcctcagtttcgggcggtcaccagagctgagtaagctcggtggagggagctgggtaaggatttcctgagagcgatgggcaggaggggctggggcagcagagcacagagcaaggaccctgaacctgcgaacctgtccggcgacccgcgcgcctagcgccaccgcacgcgcgctctggcccccgggctacccgccctcgccggcccccgcccctccgggaggaagaagagggtaggtggggaggcggatgaggggtgggggaccccttgacgtcactggaaggaggtgccggggtaggaagtgggctggggaaaggttataaatcgcccccgccctcggctgcacttcagcgaggtccttgagaggctcggagcgcggtggcggacactcccgggaggtagtgctagtggtggtggctgctgctcggagcgggctccgggactcaagcgcagcggctagcggacgcgggacggcgaggatccccccacaccacccccctcggctgcaggcgcggagaagggctctcgcggcgccaagcagaagcaggaggggaccggctcgagcggctgcgccgtcggcctcggagagcgcgggcaccgggccaacaggccgcgtcttgctcaccatggtcagctgctgggacaccgcggtcttgccttacgcgctgctcgggtgtctgcttctcacaggtgaggcgcgccagggaccatgagttggagttcggcggggatgggcagccacggggtggtccgggggaagcgagctccggcgggagccggggacacttgtagcagcgggtacgcctcgggacacacgtcttcccctccaccccccaagtgggcgccgctggaagttggcatcaccgcttagactctccttagctccacgctggggtcagagccagagtgcctgccgggtgtagccggagccgctagtcccctaccgggttcccgggtaggcgctcactccttagactctgggagtgcagatcaccacacgggtggacctttcagcatccagagcctgctcctaggctgcagcagagtcctcaagggctagttggagcaagctagatgtcagagaggctgcccggggctggacagaggtggggtcgttagcgatgagctcgctccaccagagcaaaggaggacgaaattgggaggggtcccgtgcccgcggcgagcagatggagcccagagaagggccagctctgactcccgtacccgcttgggtccgtccggaggaagctggggaacgcacagtctgcagggtttcttcccagcagttcgcggagcgccgtctcccgggtggggcctccgcggtgtggggcgggtgtgcggtccaggtcctcggagtgagtgagtgacccaaagcgacccggcagcaagttttggaattttaagccctacctttaggttatgaatctagaagaaaaaacaaaaaaacaaaaccacctgacaatttagactgaaagctgtggtttaagtagtaggtgaagtttgcgacctcctaaatcagcgttctctaggatatgaaaagcgcggggcgggggggggggggcgaccgatcaggggccggcagattttaggagcatttaatgtggagaccgtcgtcatccaagggtcaaaaagctggagggacctcgggaactctaactccaggtctgcaggcgggaggtccctttgcgcagagacgcataccagagcgtctttatttaaaccagcgtggttgggaaagaagatagagactaaagagtcaggtagaatagtagtggccccagaaagaaaggcagcaaggttttaaaagacagtaaaaataagccttttgaaatgggaagactgtacttcgtttcaaagtaatgaacaggggtttataattaaaacggactaaaatggcaaagccagaatccgacgtggctggttaggttctaaaataatgatattaaacgagttattgtattttctatttcacaaatattttcgaagagctgcttatacggaaatgcaaccgcttagagagtttaaatactgatttattatataaagacaaaactagcttaaaaaattactgcaaacccttaagttacagggtggggggaacaggcgttttattggattttctgcttgacacatgtctctactttttaattttaaagcgtggttggttttggctaagcgtaattttatctgtgttttcgaacagtggaggcagattgaagcagttcagggaaagtgtacaaagtcgctttgcgccgctagccaggcgctgagccccatcaggtgttctagcctcgatatttattagttaccaacgccctaactaccataattaccggtcctctctgtagctatcgagaccagtgtctctataaaagttcagtctcctcttcaaggcttaagacaacacactctcgtttaagtccacacccttgattagctccacaccagtgtgctctcttgcgctggctcatctctctcatcccctctgtctctgtctctgtccggctctgtctgtctgtctgtctatctgtctgtctgtcttacgcgccgctctctctcttttcccttccccctcatttcctccttccctctctccttctcctgttctcccttacttttaagcagctgacatttagagtttggtagaactaattagaaatacttaaattgtgagcttggggtgtgtgtattgtattcccaatagtaactctgagttaaaataaaaattatgcaaatagtagcagccaggtgtgagtgccctgtctgtatcctgagaactcaaggcctaaggcagaagggtggtgagttctaaccaagagtggacattggctatggagccaattaaagtcagcctgaaccacacagggaatccctttctcaaaaataataattaataataatacctattcccaaattggttagaatgcattttttaatatatagttttacatagtgatttctaatttttttctccaaggcttacacagttgtgcttttccaaaagttgcatattttaaatggttattatttgggacccttgtgggtccatgttgttttccaacttatcaatcatcttgcagataaactgtgaactaggctttctattaaaaaaattattagtgcagcatttttttttctggttgaaaagtctttaataggctatatagtttctttttaaatgatccccaattggcatttttcttttaaaaatggagaaattttgtttttttgtttgtctgtttgtttgttttctctatgcaagagtttctttgtgtaccccgggctgtcctggaacttactctgtagaccagattggcctctgccttcttagtgctgggattaaaagtgtgggctgccaccacctggcctaaaactatggttgacttccgaaggctccttttcaactataacattcagtgaaggaattccacaaagcaaacagatggggtccttccggtttcccggctccctgccattcttctgcatgttaatgggtgctaagccctttgacaccctagctgatgagctaggctgctgctgccatcggggtcacacctcatctttctctctggtagaatgtactagaccaaccaattaactgagtctttagtgggcttccttttgcattgcagggggtgcaggggtggtctgatggaggatgtgtcccagatgcctcagccactacatcactatcttgggtctttttttttttttttttttccctagcagaatgtgtaactatgacagaggctaaatcacattacctatactgaggacatctgtctctttaacctcccaccccttatttctttctttaaaaaattaatctttttaatttcttttttttttaaacagctatgttctaaaactgttccagattacaacaaggctagtaaacctcttatttaataattaaacctatttttttgtgacttctaaaagaccaaccaagtcattacttttttttcctctccgaaactatggggacaatttctgaatccttgaatgtgtataatatagaacttgaagtgatatgtataccccgctcccccccccccaaaaaagaaaaaggctttatagtgacacttgccccccttcccttcagaaaagtggttctgtggagggaaactatgtggctgatctctaccctggcttttgcggtaaagctaagagaatacaaagtaacaggacaggcaggggttttgattgtgtgtgcaggtgagcctcgggataaaaagggagttcgaggagctgggaactagtgagcagggtttggctcagcacacactaggtgctgtgtggttggcggcacacactaggtgctatactgtcatcgcaggctgagaaccatttttcaatgtccttgatagtgtgtagagaggaagaggacatttgaagatcacagcgggctctattttaagtaaaaatatattataccacgagcagctgaaagcatttaaaaacaaaacaaaacaaaaccgtattgtgttggatttagcttaacagagcagagcggctcgtgaggaaagatgtggcccctgccagacactttccaggactgccgtggaggccgaatcctgcggttcctgggatgctgcaccctgatgattaaatggctggactttgttccagaccgaaggaagggaaggaaatgggaggaatggagtatttgagggaactggagagagaagcctcagacttagcatgcagcactgtcgggggtgtgtgtgggtgttcattaaggaaatggttctactccgtctgctgaagatagtgagcgaggtttcctgcattgttgctggccggatgtgtgtgtgtgtgtggggggatgtcaagaatttctgggcatttcccatctgcctttgcaaacctggatgcttgaagaccatttctgattcctgcctctgtcttccatgccaggctccttgggagggagactcctcgatcttggctctcacacacacacatttgttgtaagagttccatgggggctcaggtttgaaagtggagagagcagttttgggatattttctcaggccccgcgttggccagtggcagacccaggatgatcccccctgaaggtcaatcagaagtccacatttctgccgcatctgtgcatttcctccacgcggacaaagtggggagggagatgcagatattcattgactgagcacttccatccatctttcctgaaccatgatatctactcacttttatagtagtagtagtagtagtagtagtagtagtagtagtagtagtattttgtggtgctggggatcaaatctagcacctttcagtagctcagcaaaggctctcccatcgagctgccttcccaacatcaccttaactatgagatttcttccactaaagctcattggagaaggcattacattcagaacctccatgccccatggtacacatctctgctctcagcactcggaaggtagaggcaggctgatctctgtgagttcaaggccagcctggtttacagagtgagttccaagacagccagacctatacagaaagaccctgtcttataaacacaacacaacaaaaagacaaaaagcaaaaaatccaaaaacaaacaaacttagaaagtatagctgcttagtagcccatgaacatatttataagattttcctctgtgagcccttggtttaatactctctgtgctggtttaatctgtcatttggtccctcgaccttctgttccacttatgccaactctgcccctccttcttagggctgggccacctctgagatcattggcccccttctcaattcccccctccctaccagggaaacccagggcagcagggcagctcctcctggtagcactagacagagtgggggcttcaccttgccactgccaccgtcctgggacccaagtatgcagcctcctgtggttgctgtcacctgcaccatttgtatgttagctgcctgtatgtgtccttcctctttggggaagagcctgtttctaagttcttcagaaatgttgctggggaggataagtgagtagggtcaccacacagccctctcaaggacacctcttagagtaaggtatgctttatttaattcctgtttgttcatgtgttcttgcctgcccgcggggcctctgggattacttaatgagattgttcccaatagctgtatgcgtgtgggacatcacaccttactccataagcatgtggttttctcagttaacaattaaaagaaaattaagggctagagagatgactcagttgagtcaacaatgactgagagcagttgttccccccggagaccagagttcagttccagtacccatgttgggcaccttttcggctcctgaaggtcaaattctttcttctagtcttctgaaagtatccccacacagggctagcatgcagacacaagcacaccatttttttaaaaaagacttttttacttacttaatgtatatgagtgttctgtcttcactcgcaccagaaaagggaatcagacctcattacagatggtcaggaaccaccatctgggtgctcccaggggcaggtgaactcaggacctgtggaagagcagccagtgctctggaccactgagccatctctccagcctcacacatcaagtttttagattaaaaccttaaacgtaaggaaagaaccggtcaatagctgaaaataaaactacaatctctgaacttatttctttgcttattacatttagatatttacttttatttcatgtgcactggtgttttacctgtgtgtatgtctgtgtgagagtgtcagagaccctgaaatgggagttacagagggttgtgagccactgggtaggtgttgggaattgaacctgggtcctctggaagaacagctagtgctcttaacctctgaaccatctctctagcctctatcactgaatttttaaaaaaatagatctgtatctctgatctgagctcaagttggtccctgtctttactgtaccccaaccctgtacatgctcacaacacactccagcactcttcttaatagccaacagtttaagtgtatgtatgcatgcattctcgaacacacaggcgcacgcacacacacacacaggcacacgtgcacgcacacacacacacacacacgcacacacaggcgcacacatacacacacacacgcacacacaggcgcacaaacacacacacacactcgctcacagtatataagaactggtcatttgcaaaatccccaggtgctttttattgccacattcaaaatggagaaatatggatttagtgaaggatttgtggtcatctccaataccagggtccggttctctgcccttacactctagtgatggcctttggctgtgcggttaagacacaaaggccaggctagccacaagcctttcctggctcccccttaagtctgatggccagtgggactcctgcatcctattcctattctctacacagactcaggcttaacccagccctccagtcaaagcagatagatgtcatcctaaggaagccataactaatcaaatgactgatgtcttagaaaacatggatttggtggagaatggtaagaacagcattaactagccaagctttaacaagaaatgaagctctgcgaggcattcgcttccaaatgctggaatgaacaccagcggtgttcgataccattttccagaatgtttggttacaaagcagcggtatcactgcctggttctgtgactgccagacccccctgttctccctctggctgggaggctggtgtgttttgtgtctgtgctctgcctggccttgctgtggcgccgttctggccaacactttagagtctgttcacagatattcacactgctcccaggcacaggtcagcaggtctgtccttccattgcatgggtggggtctacatgggatttcctttcaagccacagacccacccatgtagtctacagaggcaacgctctaacaattaccatattcttttgttgaaagaggcctcaagtgaacctggtttgaccaaaaatccttggctctcattatacgcaaatataaaatcaatcactcaagttcgagacaacttccagaaaaaccctgatgagggcttaacccgccaaaggattgctagagaatctttgtaactgcacagccctggtcctcagcctgggttgtctgttagtcaacttgaggagcgataagaatccgcttactgtctcagcacccctacctagtttgctccatggttttggtgagacccgagaattgattttaaattacaagaggattccaatagccagttgagataaccacaagcaacattagggctagagagatggctcagcggtttagagcactttaattaaagtcctcggggttgtgcaggagagcgctttgctgcctgagccatctcctccaccctgactgtttgcttttctaacaagttctgggtgaggctgatatacctggcctccttggggacctaggcctccctagggctcattatcggggcctgggcacgtgggaggcaactccccagtgataatctggaacagacactaaatagatcatgtctagattgggggactgggggtaggaaacagtttcataggattcccaccggaaagagtatgcatcggtggattttgacagaggaaatacctagacactaagggcaaagccacagggtgtgtccagccaatgtgactaaagacaaattgttgccttttaagagctggggtgctctgatggttggatggcaggagctagaagcaagaagtgaatgctaatttagacaacacagccaacagcgtttcccaaacccatcttctttcccgtggcattcagccccccttttcctaactcatcactggtcttggacaaattataagcctgcccaggatacctgggattacatcggtctaatcccatgtggttccagtgggccctgcaagatgctctctgaagactcactgatggtttgttttagtatggagactccccgactctgtctccctggctagggtcagtgcccttgacttgggtgactgacttctggacctgctagagaaaaatgctgatacacgatggttggatctgcattgtccaaagccactgcgttgtgggaacgtgaggctcgaattctccttgctagacatcagatcccaagcagcgcccctttcctcgagaacactagggattctaatcggtgttcgatgtgatcacgagtggtgccgttatcttcagacacagagtgcccagccccttgtttctgcaggttggaggccaatagttgtatcttccatctatggaagcatggccagcggtccccacacttggtggcccatgtcagttgcgtacatctcagtgtgctgcaggttagacttctgggccctctgctggtggtttcctttagctcccgcctgagtctcttggacagacacagtctaagcagtttccctgagaacttggtactggggtcccctcccatgtggcctttcctccctcggtgcagccgggactctctcacacagaggcaggagctttccttcagttcactgtacggtgtctgcaaggtgtctgaaggcccgcattttggaattcctacatcacgttgccacattcttttgctccaagctagacctggcccaggttcctggactgcggaggcggcttcttctgaggggaggggcaacaccatttgacacttccactttgcttttccgtcttggctagcgtttggcccagaaaattatagtagctgataaataataatgagtgctaaaaaaatgtcttggcccttacaacggggcttgggcaagaaagactcgattctgacctatgggacggggttcccattcataaagcttgttcgtcacacacaggccagggttagcctggcatgcagagttggcagagcagcctcttaggatgattgtgattccagtaagggagccagctggtcctggaggctgagtgttagcagctctgtggcggcggcggcagcggaggcagcagcagcagcagcagcagcagcagtggctgctgctcctcctcctcctctttctccttccctgccttcctcctccctctctcccttccttcttctccttctcttcttcctcctcactcctccctttctccctcctcctcctcttcctgctcttcttcctcctcttcctgctcctcttcctcctcctcctcttcctcctcttcctcctcctccgcctctttacctggcctcactgtatcgccctagctgtcctggaactccatgctgtagaccaggctggctttaaaatcagagagatctgcctgcctctgcctttcaagtgctgggattaagagcagttaccaccatgccctgcagctttgtagcttcttgcagtcttagcccatggaacccttggccctcttctgtagagacagagaagctgtggtagggtgtgtgtgtgtgtgtgtgtgtgtgtgtgtgtgtgtgtgtgtgtgtgaagcgacctccccagctgtcaggcgctttcacttacacatctcactgggtcccagagttaggtatggtggctcacagcactgagtgatttctgctgacagaacagtgctgaggtcatggttctacctttactgccgccacactggtaccaagtggaaacaggagcgctcctccgtacaccaggctttggaaacgggatgtctgtctccggtagtagggaaagctgcagttatctgaacccgcttttgtcagtcccggaagcccctcttggtgtgtcacaacccaacggaaaagtagagaaggagaaagagccttcgtggggtccgggagggggtgtttgttttctctgggctgccccggtcagtctgtccttggagttttgccatcctcaaggaatgtgagaagccactgccactccatcttaaagtgaccctgggagatttcactaccgtgtgttgaagacagtgttaagatctcgattaaagcagacttttctctctgtggcctttcttattgtgaataaccaagaacactcatcgagatatcagaataggatcccaaaaagccattaagaatatggcatgacagtgtccttccaatgtgcaaaggatcatgggccgagggtgcaaagctctcatttagagggtctggagtaaaagccagggctgccctctgacggtttccagaaatcccatgttcctccagcaagcactctctacatcctacaccctaagagacttggtgcttcctaggggtgaagcggggcatggccagaagtatattatacatgaaggtaaatgctctgggtaccggagtgagggtggatgctcattctgtcccccagaaggggaagaggaagagattcggattcagggggactcctctgcaggcgtggagcatgcaggcttcttggtaaccatccaccaccggcgctttcagctttgatggaaccctgaggctgggggataattggataacgtgctgagagccacacactgtggatcggtcaggctggaattcaaatgtgtttttcttgacttcaaaaccagccctctcccccaacattttcctaaaatagcttgatgagggaagccttgggactcaagaaaaggcaacaggttttgttttcgggtattagaataaaaggccaaggcatctgtgggaagaccgtggttcaaaggcctttggtagaggcagttttcagtctggggctgattttcaaggttgagtccttgtacagtgaatgacgctagaagcttgtgtatatgtgtatatgtgtgcatgtatatttatgcgtgtttgtatatgtgtgtatgtaggtgtagatatgtttatgtaagtatatgtgagtgtgtatatgtttatgtgttatgtgtgaatgtatatttatgtgtgtatatgtatatatgtgtgtgtgagagtgtgtgtatgtgagattacgtatgagtgtatatatgatgtttgtgtgtgtagatgtatgtatgtgtatatatgtgtatgtgtgagagagagagagtatatgtgaatgtgtatgtgtgtttgtttgtgtgtatatgtatgtgtgtgagagtatgtgtatgtttgtgtatgtgtatgtgtgtgagttatatgtgtatgtttgtgtgtgtatatgtatgtttgtgtgtatatgtatgtgtgtgagagtatgtgtatgtttgtgtatgtgtgtgagtgtatatgtgtatgtttgtgtgtgtatatgtatgtatgtgagagtgtgtatatatatatgtttgtgtgtatgtgtttgtgtttgtgttgtgctgtagctggctggacactgagcaactctgaacattggacaactggattcaactgcagcttgtggtattctgtcctctctgcgctctctctctctctctctctctctctctctctctctctctctctctctctctctctctctgttcaggtcagcaaaaagtcaagaaagagaaggaagtattaacttgtttggccaggtggtggtacatgcctttaatcccagcactcgggaggcagaggcaggtggatttctgagttcgaggccagcctggtctacagagtgagttccaggacagccagggccagggctacacagagaaatcctgtctcaaacaaacaaacaaacaaacaaacaacttgtttgtcctaatactccaagagtgacaggcactctttcatccccagagtagacgacagttatcagaacctggagaaaatcctgtcctgctgtctgctgaggactttcagtttgtgtgtcaaggaaatagccagaaagtgtgtccaaatgcagtcccatgcttcagatgaaagtgatatagagcactccgctccacatttaccactgtttcctgagttagctttaggaacacccaaaccatactttggttttttggttttttttttgtttttgtttttgttttttttttttttttttttttttttttcgagacagggtttctctgtgtagccctggctgtcctggaactcactttgtagaccaggctgaacttgaactcagaaatccgcctgtctctgcctcacccaaaccatacttaagtggatgaaaagacagcatttggtctgggatcgatgagtggttgtcttgttggaaaacacggtttaaaactttttttctgctaaagtcttccgctggcccaggctttcctgtagtgctgtcttttaaggacttttacagcattggagccctgtccatagggagttccacgagaaccggggaaggtgggtgtgcttgcagcctgagagactgcctagcctgggatgggatttgagtacctgtggcctggtttgaggctaaggagtgccactcccaagttgttgatacagaaattcaatgcagtctcctccccactctgcatctccctctgccttgaaaaggaccccacgcagggcacgttcctcacaaagtcacttgggaactggagaaattgaggtgacagacaagaatgccaatcgtcagaaatttcaggtgaccagatatatcgttgtcttagaggtggcagaatctcgagcatagacatgaagcttgtctggagctgtggccactgtcattgtacgggttcttgctgttatgtagtgttttcaaattcaagcacatgggcctggaaatactgaagagacccagtccctatctggggagactgttgactcggtgatagactcggtgggagatgtcacaggaaggcctgttctcagaaggatttgaaactctgggttttctcccattattgcacaatgaaaaacacagaccctggaaactttaattctcatgccaactccacagccagccaccaccctcccagttccaactagagtagaggcatgcttagaagactctttattttgccaggtgtgtgacacacacgtcttcagttccagcactcaggaggcagaggcagggaggcagggaggcagggaggcagggaggcagggaggcagggaggcagggaggcagaggcaggtggatctctgtgagttggaggccagcctggtctacataagcaagttccacgaaggttcttctacttggggacattttaacctgttccctcagaaggtgctatggcaaccatcgtgagagcccccccccctttttttatgagaacaaatacagtttaaattcactgtgcctcatgcttagcattgaatagatgcttgtgttctgtgaatagtatagcaaattttacgaaagtgagtcactgagttaagtgaagagtttggaactgacaatggtaaatagcgtgtgcttaaagcacaaagcgtgaagagtttgggttgttgatgtcagagatcttctggatttcttggttatcaactgttctgtgtctagtggcatttcctaagaggtcagctttggcaggaaaatctatttaagccaaagagccatctttgctgctgtgatgctggtaacagtccctggcaggtgaggaccgctgactcctgtcactcaggaaatgctgagatggcagactcatgctgtgtcttaagcagttcttctgggcctcggaggcatctgcaggagtcttggcccctgctgttcaccatctaaacatgtaaatatgcaagtggaagaggttgtaagaacacaccatggagtggaaataattcttccacggtgtgtgtgtgtgtgtgtgtgtgtgtgtgtgtgtttgtgtatgtgtgtgacaatttgtttttctgctttgttggtcatcctccgggtccagtccatcttcttttctcagcctgggctgagctggctatgttctcttgattgacaccagacccaggagggagaatgggaacataagccgtccacccctgaagaactgtcctcctggatgctggcttggagacaggttcttctgctgaggttctgtctgcaggtgaaggttcccagcacagaccctaggtacaccaaacacaacccaagagtccaggcgacacctctgctttccctgccttggatcagaacattctggtcaagagttctttcctctcactctgggccatccatggtatagagtagatgaacagagatggccagggcatgttagtcctagctgacacacctcatacgagggtcatctgttcctctcctcgttgctgaatcttccgcagacatttgccaccgacaatctgtttcagaaaccacaacatgacctcagtgtttacttatgactttttcctggtgccaaggtagaccccagactcaaaacatctgagaatcaaagaaggtgaaaccaagttttctcctctcagcaaagaggtcaaggaagggagagttttaagaggcaggagagtttaaaaggaaatgtgtgtttgcctcactagggtgtcgtaggtatttggccccagtggtgcagtatacattggcctatttgttgtccctgttaagtgataagggcttttgagaaagttatcaggggccagtgaaatggctcgagtggataaaggtgcttgctgccaagtcagactacccaagttcaatccctgacacctacctatgtagtggagaaagagacccaactcctacaagttgttctatggcctacacacacacacacacaaacaccatgtcatgtgaaaacacacacacacacatgttaattaacaaaatacaaagagagaacccggtattgtctactacttaccccactctctgtgtatgttcagatatgttcactggcttacctgtgatgctgctgctcgcttgtaaccttgggcctcgggatgtggaggagggaagacaattccactctctctgggtgacatagtgagttctaggccagcctgcacatcatagggagactctgttaatgttttctaagatatgcatgcatatctggagaggtatctcagtggcgagtgcacttgccgtgcaaacctgagaatcacagtttgggtccctagaactcatgtaagtggcaggtaggcatggtgactgacggatggcaggcaggcaggcatggtgactgaccgacaactccagccgtggaagacagaaacaggagatcccctgagcatgctagttagagagactgaccatataggtgagcctgtgtttgattgagagaccttgccccagtgagtaagaagggcaattgagaatgattctggacgtgagccttgggctgccctctgcacatgaacccacacgcaggcatacccacacacatgtgcacccatatagataaacatgcacagacacaccctttaatgaatggatttaaaacatctcctgtatagagagtcaactccaaaggactctagattataaaggcggagctattgaagaaaacaagatgaaactttgtgttggttttactaattttttctggctttttcttgtatgaatagctcagtacatcacacatgcatgcatgtacacatacatgcacagcaattgatcttcatttttactacacaaagaggcattaatttggattcagagttaaaacttgaataaaatgtgctttggctatttttaaaatttttatgtgtatgggtgttgtgcttgtttgaatgtgcaccatatgcatgcagtgcccatggagaccagaagagggcgtctgatcccccggaactggagttacacatggttttgagccaccatgtgggtgctgggaacgaaaccctggttctctggaagagcaggtggtgctctagacccctgagccatctctccagcttaactgttgtcatggtgtatgtatggttgagatttgggcattgaacagtaaggggtggaagaaattcggcatcataagtaccattctctgctttcagcctagtaacttgttgcttacagaggagatggaggacacctttctccaaactgggatttataattctacacggctgaccgctgtccttctaatatgtaggacaactcaggcacgttagggcaattactcacacctaacaatgcaatcctacccagtcttctttcacccacagcattctgtgactggttctggaccattgtatagaaaccgtgattcccaatggaacctgcaggatgcatcagctgaccaaagcattgtacacattgcatatatgttcatacatgttcacttcacatatattatatgtttgttgcaacaacaccattgagctatctttgctactgtggtgttacttttatgagaaatgcgtgtgttctcacctggagtgatgtgtgactttcaccttgaacaatagcacagcacttagcagcaactacgacctgctctgtatgatgtgacatccgggcccagcttcccgtgctctgagctgtggcactggggaagaatataagatggggggtgaacagaatggagtggacttgctgctgctggcaagggaaaccaagatagagctaaaatgaaatctaccctgtgcagttttagggagcatttgtctctgttcccggcccctttgtacaactaggtgaaggtctgatgggtttcaccactaaatacaagccatgtttcatgtcctgttaaccagactttgaaccttctgtgtgacacagaaccatgagacgaaaggacacatgggtagactctgtggagatcagtttcattcaattaaagaagagttcgtgggaggagaacatctggggggaaaggtatccacttggtcagagtgacatttccccccctgtcaactcaattaattccgacgtcacatgagaagaagctgtttgtgactataggtcactggaggggtaggctcctgatggtagctggtgacagggctaatgatggatgggggttaacctgtgaccctcagagcaaccagtgtctggtttaaaaaaaaaactccaggactcactgcagacatggcccctggccccattcttatgcatcagcagtcagaatgtgatgaggctgggggatttctctcttggtaaacattttataaagatgtcaggaaggtgagtaagtttgccgacctgtggatggagcaagtgagactgtaccagagcagatcatgacttctcgtgggacttgtttggtgtgaatataattctccacatgtgtgctgtggtatgcttgcattatgcatttaaataacctctttaaatgttgtgtgtgtgtgtgtgtgtgtgtgtgtgtgtgtgtttgtgtatcttgcatgtgtgcatgtgtgtgtatacatgtaagtacagatacatgcatatcacggcacacatgtggaggtcagaggacaacttttgggacacatttctcctcccaccagggttccagggagtgaactcaatttatcagatttgtgcaagcaagtgtgtttacccaccaagctaaccctggcctccttaggtaacttcttgacttgatttgtggcacaaagtttcaagatgcaaatgatatatggctatttcaagtttctataaatacaaaaaagtcagagtacaattttttgagtcctagtgattcgaggatttacctagaaatagcaaaaaccttgccagacactggtgaattttctacatggattgagtgtggtaaaaataagtctaatataggactttaaggtgagcagcgagtcactgggattcagaactgtatacaaatcacattcttgctttctgatcagcatctttgtagacgttcagggcctcctctggaccccgagagctgtaagttcagtagctatcctgagatgctctgtgtggtgagtttgcccattgtaaagtcatgagtcatctctcctccataaggattagtcagcactgagtctcagcttcctgctcctccaaaacagacttcagtttgggaatcccagctagggaggggctttcccttcctctgaactgaatgaagagtataattaaaaacctcccccattcctcctgctacctcttggcccggcagtttaaacagagagagaggcatcactatgtactccaatgagcacccttctcttaacttcttcgtccttgatttaaagccttgattaaaacaaatggggcctgggtggtaggtaagtgatggagccagacctcagcatgcaatgagaccttgcgtttcaccccggtaccaaaaccaaatagataaatgaagccagtttggaaggaaggactcagtgttttgggttcgcagttgggacttttgttttaattctcccttcatctctgcaggtgagacatgggccctgtagcctgtctccatcttctggcgactcagatgggaagatctcactcagtgggctcccccagtagttagaactgttacagtttccagttacagcttcccaggacctgtgaagggcagagcagagcagagctgtgatgtgggattaaggcttagacttaatctattaaatcccacagctctggaggacttcgattctcaaatacaaatttcagtagcttctagaaattcacacctgtaccccattttcactccaaatctgcccccaccccctctccccacccacaccagcacaagagtcccaccatatttagacttatgggatgtgggcttttaataagctccatcttgacgggaggagccttcctttattatgaattgtgtttaattgacctcacgtaaccttgagagatgacgcattgtctttagctcaatttttttgaaacatgatatttgaattatatttagataaagaggccatttatcatgtaggattatgttctattgaaaacatagtatgaacaatgaaaagcagatgtttcacatctgaaataaatatatctacaaagcttttgagttggaaaccaattaattagaagtcaggctttttgtttttgtttgttttgtttgagacaaagctgtactgcatagttggttggcctggaactcactgtgtaaaacaagcctgtccccaaactcacagggacctgcctgcttcttcctgtggggtgctgggattgaaagggtgtgtcaccatgcctggcagaaacaaacaaaaaaatttatatcgaatgaaacagtagtagttttcttaagaaattcctgtcaacaactgaactgtcggtgtgactcaatttgattagaaattcccctttaaatatgcaaatgaacagtagacttgcagtgttgtgatggggtaggcagtgaggatggatttaccccagggtgatgtaaaacttgtacataaattgtgatgttactacataaagggtaagctgtttctcttaaccctaaaaattgaaggtgaaccccaaatgtaactcctggggagctttgttgttaagatgtattttcttttgaaatatatatatgtatggtgtgtgtatgcgtgtgtgcatgcttgtgtgtttgcgtgcgcatgcatgtgtatgtgtatgtatgtgcatgtgtgtgcttgtatattgtgcacgtgcatgcatgtgtttatgtgcatacatgtatgtgtgtgcgcatgtatgtgtttgtatgtgtgtgttcgtgcattgtgcatgtgtctatgtgcatatgtgtgtgtatgtgtgtgcgtgtttgtgcttgtttgtgtgtgcacacgtgcatgcatgcatgtgtttatgtgcatacatgtacatgtgtgtgcacgagtgtgtgtgtgtgtgtgtgtgtgtgtgtgtgtgtgtgtgagtgtaggttctcaaggaaatcagacacatcagatcctctggagctggaggtacaggtggttgtgagcccccggagtcctgggaacaagcttgggtcctctgcaagagcagtatgtgcacttatgtctgagtttgtatgtggctgtgtattttcaattctttagggtaggtatttaggagagtaattgctggaaaatccttttaacccatggttaacttattattgggacttttgagtggctactatactgttttccaaggtagctgcattttttaaaaaaaaaaatccaatcagcagtgacccagcttgtaatttctctacctgctcatgtgacaacacagggtcatcacccttctcttataatttccaccatcctggcagtttagtagagtggcttttgctttttgttttcttgctggctaatggcattcttcatcttttcaaattctcttcgggaaaatgtctgttccgacccaaggtggattttccaaattgagctatcagcctttttattacgcataaatattttcagcatgtgaagatggtggtgatggtgataatgatttatacagggtctctctgtgtagctgtggctggtctagaactcagtatgtagaccaggctggcctgaaactcaaagagattcactatctcttccaccaagtgctgggattaaaggtgtgcgccatcaggcccagcctaaacattgggatttctaatttgtcatcaacagctgcgacctcagagtcaaaggtcacagaggtcagaggctggaagaaattgttcatgtgagtcccaccggcttgcttgttaggatcagagccaggaagggaggtggtgggtgactctgaatcaaagaagaatgggtgtttcatgatgtacacagctgttgtttaatggcaagaaatatattgtaagaaatgcattttagacaaagtctctatcgtgtgaacaccatagcctatgtgtacaaagcagaacacgccattgctaggcccatgttcccactgtggtatatacttcccactgtgaacaaaactgtggtattccattgtggacaagtgcctcccttagagaataatactggtgtctatgtgtttggctatgcaccatgtgggcacaggtgcccttgcaggccagagtctccagctctggagttaacacttgatcttgaaccccctggtgtgggtgctgagccccaatccctggtcctctccaaaagcaacgagtattggtatccaccgagtcacggtttcttatctgatacttagacccttgtaaggctgtctggtccctcagcacacagccttggggaacttttgagggagattcatccatttgatcttggatttggtttcacaataaagtcgtgcattgctagaagtggactcactctgctgaagtcaaagatgcattccattttggaatattttattttattttattttattttattttattttattttattttattttattttaagaaagggcatcactatgtagactaggctgccctcaaactcaaagagatccatttgcttctgcctcccaaacatactactgtgtcaagctcaacatgctggtatgtttagtgctattagctatagtgatgtaccataattaacatatataatatatagtatatggtgtatagtgtataatatataatacctaatacataacataatatattgctatatgatattatataatgtattccatattctatatttattatatattatagttataatagtatatagctaagcccattgtcctagtctgcattgaaattttccattattatgttaaacaatactcttcctgatggaaaaaagatctctatgcttcccatctcacggttggctttgatgtcaaaggataaaaaaaaaatatttctttaaatcgcatgtcaaggctactgtggccaacagtggaaagttctgacacccacccaagctttactatgggaatcattaccacagggtgctccacccttgaaaatggaatgtcctgttgctttattgtcgaaaggggcagcccagctctgagttactgcgggagcccctgagcagggatgcatctgctgcaggtatcactagtgacgcagggagtgactgatgggcagccgatgctccaaagccagtcgctgaaccattattactcaggcagagatcatcaaccacctctaataaatgttttatggatggatactactttctagaagcattagggaaaaaatttcccttattaattttctgctaagctatatttgtaggtttgatgagaagggttttcactgtgtggtcctggctgggctggctttgaactcacaacccttctgcttcagtctcccgaatgctgggagtatagacaggtaccaacatatctggttcctgccaatcctgatgtgagcctactttcctgttcactgaagaatgctattaaagggttcagcagctcagaaatatcgtatccttatacttccttttctaaatacatttttaaagtattttttaatatgcatatgggtattttgtctgcatgtatgcctgggcaccacatgggtgccaaaagagtgtgctggatcccctggaattagagttacagatggttgtgaaccaccatatagttgctaagaatggagcctgggttctctgcaagagcagccagtgctctaaccattgagcatctctctagctctccctccttttctgaaccggctgggttacccaacttgtagacctcattggtgttaatgataaactccagagtgaagattaattttcttagcatttccaccccaagatttccaaggaaccccactttcctccagcgtgtctaatcactcactcagggggtgtctgggtcggaagacagcgcaaagagcagagagtatactggagggtttgttccttaagagaactgcttaacggtgcttcttattcggcgagcatgcgccttgaagtgtcaaggttcccttgacaagaatcaaggcatttagccactctaagttaccctcgaaagaactaatacaaatagaataccaatcgaaagattaatacaactagaacaccccaagttgggaaaaatggaagcctcttccccatggcctctcctgcagggaaagcttgatcaaatctacctaacgggtagttaggtaatggttacagttgatgccagactttcccgcagggtccttgccaacactgagacaattgctcaattaaaccacaaagttccatgactcaagatgggcagaggcaattctggcctgaaaatttggggggggggagggtaggtgttaccaactattagctgtggctttaggaaaacctactgttcttggcgggggtgggggtggggtgtcatcgcaccaggaaactcaaaaaagattaaaatacaaagtttgctcctatgtatccaagagagttgacttttatgtggtttgaggggcaggaaaactaggtctgtatgttagcatcccttataggctctgcccaacagttacctggcaacagccagttaagagcctgacttgctataaaaggagtttctttcttcctcctcctcctcttcttcttcttcctcttcctcttcctcctccttcttccccttctccctgctcttcctcctttttgatctctctttcttcccctccatttttctctctgttccctctctctcccctctttccctctgttcatgtttttccagtcctgcctcttcccttccttctctcttctctctcttcctgttcttctctgccctcttcctttctctgtctctacttccttcacacaactccttctagcataaacattttatgctagacccatcatatggctggtacctggggggtaggggggcgatgcttaagcctgagcctgctaaggagcctcctcctgccacaccatgccaccacattataaaacacaccactatatgaaactggttttaatttatttaaagtcattagtgtcctgtcatttcatctatgaataatgtgataccagtaactcttaccaattgaagataccttctaaaatattaattttaccactagcaacatttagaaaatataatgttcacttaatatcttccctcccacaattacatatggaatagaatatcttctgacagcagctatgctgggtgtggggcggggaggggggaatccaccacgtggtaggtgctgaatcagcctcttgtgcagcatagctctgaccctgcaccctctctgcacagtcagaaagagggaaaagaggccacctctgcactccagagtttggaagagtcatgtactcttcgagatgaagagaaacactagtgaacatagctcagagagccacgtgacctgagaggccaaatgggagtcgtatatctaaaagtattcagtccagctcatagagaagagagagagacacacacagagacagggagacagtcagatggacagagagacacagagataatccctgggatgggtgtcatcatcacattatataaagatacatagatcataagctacttccatgtgccttattctgttgaagcagagcaacctgaagtgggcttgtctggtgcaagagaataagtcattttaccccatcaccatggagggattaagcaagacacagaccatgcaagactaggctcagattatgcaggataagacaggcagcttctaagctgactttgactctaaaattagttttccaaaggaggaaacagtttagaaagaaaaaaaaaaaactcagtggctggccccagatattgcttagctatcgaatgagtgacatcccgaagctacaaccggacaaggtggctcacgtttgcaacctaaacatttgggagattgtcttagtcagggcttccattgctgtgaggagacaccatggccaaggcaactcttataagggacagaatttaattggtgctggcttataggttcagaggttcagtccgttattatcatggcaggaagcatggcagcgtgcaggcagatatggtgctggagatgctgagagttctgcgtcttgatctaagactctccaaggtagctagaaggagtgtctcaaaacccacccccaaagcgacacacttccttccacaaggccatacctcctccaaaaggccacacctcctaatagtgccacttcctgtgccaagcacattcaaacatgtgagtctatggagaccattcttattcaaaccactacagaggttcaggtaagaggtttgtcatgaagtccaggccagcctgggctaattagtgagaccctgtctccaggacacaaaggaacaaagagaaacttgcatccagtgtatcctttgcataaatgactaaagaaagaaattcatcttttagaagaggcaataaaccatttaaaaataacacattttaattttttgtttgttttataggatatggctcagggtcgaagttaaaagtgcctgaactgagtttaaaaggcacccagcatgtcatgcaagcaggccagactctctttctcaagtgcaggtgagtggcggtgtgggtatgggtgtaataatctacattccaaaatcagactccctccttgacgaggaggggtgacttcagtggcccccaggattaagcttcacatagaggatttgtcaccttgaaggaacgatgtccagatgcccagacgtcgtcacatctttatcctgaccattgtcccaaagctcctttgactctgtggcttgctcggaatgaagcagagggctttctgagaaagtagatgcctcagagccggcactgagtccggcccctgccttgaccgtgctttcctttctcgcctgcttgcagaggggaggcagcccactcatggtctctgcccacgaccgtgagccaggaggacaaaaggctgagcatcactcccccatcggcctgtgggagggataacaggcaattctgcagcaccttgaccttggacacggcgcaggccaaccacacgggcctctacacctgtagatacctccctacatctacttcgaagaaaaagaaagcggaatcttcaatctacatatttgttagtggtaagactcctacctttggtgctctctgtttagcagtgggtcagagatctactgtgcctgggtgagaatatatggttttcctagtaaatgtggtataaccgggcagcagagagccattagcctagatgcagaagcctgcaaaacagatcttaacgctttttgtcagtcatcttcaactagaatattctagacccagtgagtttaatgttccctatgggaagagattgtggcctacttagttgactcccataataccagaacagggtctggctatagttagactgaacgataggatgggatcagagttccatgtgtgaattattgagaaactcaatataagatgccaggaggtggtccttcagcacagtgcattctcttacatgttaggtcagtggcacatttaaatcactggggatacacacacacacacacacacacacacacacacacacacgagataccagagtgtgctcgacagctttcttcactaagttaatcagtatgaaagtaaattcctgggtgtggaactggagagatggctcagccattcagggcacttgctactcttgcagagggcccaggttcaattcttagcacccacatccaggtacaactctctgatcctacagttctacaggatctgacacagtccttaggcacctcacacacacacacacacacacacacacacgacacataaagatacatgcagacaagcactgatgcacataaactaaaaataagtcattaaagacaacgaagtaataatttaatagccacaacgctgctactgtctcttaagactttctgtatttgtttcagtggactacagttgaccacaattcacacgcactgaggaaatattagtgacctaagaacaggtgtattatgctgaaaaagacaaaggtagaaacgtgtccttttggtcatcatccttcagagctgccttttctgtccttagagaaagatgaaatgattcagagggaggcactgcagaaccttcgggaagtagatatcgggaatagaaacgacctctgagaacaaagaggcaaactgccatccttttgcttgcccttgctcagtcctcccgaaactggaaactccttaaggagatctaaagatcgtaacatgaaattagtttgtgcttcagtcagagactggggggggggggggcaaggggtcctgtctttaattcccagccaccacatggaggctcaggaccatctgtaatgagatctgacaccctcttctatcatgcaggcatacagagccctaacaaacagtaaataaataaacaaatagatactcaaaaaagcaaaaagcaaccagccaccagcctcaatagaaaaatacccactgtgagcctacccccgggtgggagagttagagtcttttctgtgggttcctgtgatcatcctgcttccggactggtctgaagggacagtcatcagctgcacgctgttaacagtcacctctttctagctaccgtcagttgcagttcctttcctgtcctgaagttgtgtccaggatcgtatgcacgcccaccaagcaagtgtcactgagctgtgtccctttcgtatttaagggacaggctctcaccgagttgcctgtctgcccttgaagtcctgagacagcgagagtcagctgtccaagcaagacaggaacttagcacccaatgttataaccgatactgcggataaatgtcggcttagtcggacagtgtgccaagactgataactgatgctgccatgggattcgtggggaacagtagccaccttgtcagggatctgcacctaccttactgtctttctctggaggttctgattagcctcacagagcttcttaaagccaagacgctggaacagcaggaactctcccgagttgccaaaactttcctatatttttgtttttgttacttttatttattctcttctgaggaaatcggggctgcttcccccatttttttcctgactactcccacggcggtttgcttccgttgtaagacacaaaccttgcctctctctctgataatagcgcagattctctcttgattttagtggcttataacgacaagagaccttgtataagtttattttggaaggcagctgtagagcttccgggggttgagaaagaaagaaccaggcacgtatagcttctacttactaccaaatgcaacccgtggacgagcagagagtgtttaggacatagtggagggcccctgtttcgcaggcagttgccagctgagttctgatgtgggcagagcctctgatagcatacagaacactagttgtctccactctgacactgcagtttacacctgcccaccaagcctccacgggaagccagccttagagtaatttaagtattcaaatgatcgtggttaactacttcagctgactactaagttggttggctggctgaaaagttccactaatttgacttctcacacctgttaaatttcccttttgcggagcaaatggttgtgtttatagggtaccatttatccccacccctaacctagttactccactcttctctagcaagggaatgcccctcaccgcaggcttttcagaaagcaatggggcacctgctgttgcaggattaagagggcagtcttaacccgcctcagtctcagtggtgggaggagacaggtgggtccagactgaggcagggaagccagttaaggtttggtgtgtgcctagcggcctagaagtgacccggaaggagagaactgataggtttaaggaattcaatcagccttgataactggacagggaagattcagagagacacttcagttctgtcagggttctgtcagggtagcagcttcctctgggtcacagccaggcagagtcttccctggcagatgatactgatgtaagccatcccttcggatagactcttgacacggtctggacaaatggcatttgagtgtgaattgctgataaaatagaattctcaaaaaaaaaaaaaaaaagtagctatgaaatgctggctcataaaagaactgaatgctcacggcgcgcctctcagttgttccttcttacaaagtgtttcaggctacctgtgccccctccgtctcccgagggagggagaagattgtgttcacgcttaggtgctctggggcaaggatttggcttaggacagtcctttctagaagtcgaaggatttcttatgagttttaagtggacagtaggatgccgacccacagagttttcttcacatgcgcatgcgtgcgagtgagtgcgcatgtgcagaaaagtctgtgggttttgctccagggattgtctctggttcctgccacagttgtcgctttgagcggctggtcagaagcagcaggtattgatgggttgggtgggttttgtctcacgtgattccatgaacccgtaagtgtgagccaagtctgcctcagcacctttgggcttcatgcagtgcctagatgagtttctgaaaacagcagtagtcaaaggtggaattgcatctggaaaaattctacctcaaatgggtcttccgtagaactccttctggagtgtctacacacagcttcggtcacattttgctagggttgatgaaattcttatagaagagaaacatagatttctaccatttatcataaaggacaagagtggtttggaatcacagattttccacatcccttagaaatcaggaccgtgtatatcctggctgtgcgctccctctagggccgtggtagtggaccaggaccacatggccagagctcagacataactcagtcactttccttctcagtgacataaaactttgataaagatactcttgatgtctgtaagccctgccatgtcacatgtctcttaaagaagcacttgtgtcattaaactccagaggccctcgccgggggtggagacatacccacgtgtgactaggatggaagccactcttgttgctgttcttggcagactttccattcatctagaatgttccttaggttgccatctttcacactgccaaatgttcaggctgtcgcttagtgaaagagagtaacttctggtgtttgctggactatgtgtctgaaggatctggcacacggtccttgaggccgaatcgatcaatacaccttgctaacaatgacgtatgtatcagcaggcattttagcagaatcacacgggcactcaaaattaatcaaaatgaacatagtcttgaatgagccacttgggcacagcctgtgattttgagaagttgatgactgaggatagaattgtgacatcttccattggcagtgccatccaaagacggtacacaattggcagtgtgttctcatttccgcccatacagtcaagacgtttgacatagccgattgaaacttcatgaagttttgtctatttggctttttgtggttttgttggtagtggttttcgagacagggtttctctgtgtatccctggatgtcttggaatttgttctgtagaccaggctagcctcaaactcggaaatccgcctgcaagtgctgggattaaaggcgtgcatcaagcaactttttaaggaagatgagcaagaagggctttctcaaaagacattcccttaagctgaaaaggctttaggtatctgacatttcattagcttaacactcctgatggaatgtctgccctgtctatagccatgaaggcagcaatctgtgtgggtccttgcagccgtggagtgctgacatcctgacccccccctttactgcagaatgcatttgttctcccattggatgcatctttcctgagctacactgggctctgtggctggctgtggtactcagtgtccatggcgtcttcctttcatcagacatcagttactgagtggccatgcaaacagcatatcctagagtttatgttggtttcaagctcctgctatggcttgccctaggccttcagctttgtgggaaacaattcgaagaataatggctgacattatggggatgttagtctctatttcaacagataccagccttcaaggagctgtaccttctgttttgtgtatgcatatggatgtgtgcaacagggtattgcatgaagaaggtgttggatccccagaagcaaatggtggtctgtgagctgcctgatatgagtgctggaatccagactcatccctccagctccatttgtgtgtgtgtgtgtgtgtgtgtgtgtgtgtgtgtgtgtgtgtttaaataaatgacctcattcattcacagcttacataaaggttctcatcaaagtcgatcggaaggaacagggatcttccgaatacattctgtccccacgtggaagccaccccgccattcacacctctgtccgactggtactgctgatgagcccacatttacgatcggaattaaccaagtgtgtagataaccctagataacgttaggtgacagggcctgacagtgtagcctgggctctcctgaagctatgtagacctgactggccttgaccttgtggagactctcatgcccctgtctcctgaattgccatgcctggcttagggttcacccagatgctgtataatcttgagtttagattaacacacgatggcacgtagctatcatcgtgtatcatacagcgtctgttatagatcagcgcctttctttttgtaacatgtctcagattcctccatgttgcagagtggcctgcccctttaatccagcactggggaggcagaggcaggcacatctatgagtctaaccttggtcggtctatgtagagaatgccaggacagccaaggcaacatagagagaccagatccccaaacacacacaaaacaaaacaaaatgattcttccatgttttcttataccttgatatttctttccttccttcctcttcctccttcatagtgctcctccttcatagtcttcctccctttcatagttctcctcctccccttcttaatcttcctccttcatagtcctcctcctctttcatagtcctcctccttcatagtcctcctcctccccttcttagtcttcctccttcatagtcctcctcctccttcatagtcctccacctccttcatagttctcctcctcctcccctccctcctccccctccatctcatgtgtcccaggagggcttcagctttgctctgtgaggatgacctgagattgcatgccccaacacacatggtttatgcagatctcggcatcaaacccagggcttcatgcatgcattacctcctgagctaaatccctagacctgcatttctttagcactaaatatatccaattgtctgtaggctccattagtttatttgccctttcacctactgaagaaggtcttagttgcttggcagtcatgactaaggatgctatgaacacccacggccatagctgtcaactcttaggcaaatagcagaaagggtgattgctggattgcatgctagcagtatgattgctttgtaaggaattgccaagctacctccagagcatctgtcgtggtcacgccatcttccatccccaccagcgatggatagaattcctggcatgctgtgtgcttcaccagcatctgagattgtctgtgttccggacttgggctatccttactgatggacagtggtatcttattgttctgatgtacatcttcccggtggcatgatgtaaaacatgcattccttggtgcgatgtctggttacaatcactggaccactttttattcttatttttaatctcccatcctttgatctttagcagaggatcctcattttatgctgaagactgtgatccactctgagttaatttttgtaatctcatgtttatattctttttttttatttattgtatgtgcatgagtgtttgcctgtgtgtcttttcaacaaacacttctagaacaagtggatatccatttgtaaaggacagtttttaaaatgagcataggggctagagagaaggcccagctgttaaaagcacttgctgctcttgcagaggacctgggttttattcccagcatccccatggctgccccagtggatctagtgccctcttctggcctccacaggcactacaagcacagggtgaacataatacatgcactatacacataaactaaaaaataaataaaaagaagtagaagcttggatgcgaaataaggaatcaaatggtgtgggtatatccacaccccttgcttctatgaaaaataaccaggctttgtcattagaatcctgatgtcagaatacctgaacaggaaggcaggcaggcagactgcactgtgacattgagagctacctatacgtggcatgagctgtcttgggacatgtatacccccaggtacaggcattcaggacaaggcaggtactcactggatgggaccagatgctcctgaggtacccagggcctttctagtgctgagatgttcctggctcccgtcatttctggctatctcctcaggtcctttccactgcagcccaacaagacaaattccatcaaagtttctcttttggatatgccagtgtgtcaaagtcagtcatttctgctctctaaatatcttttatatattgaactttgcatccaagaatggaaattatcaattaagcctcaggcccatgtctggttccctgtgaagtctctgactgtttcaactcctccttcctcagcatctaatatgaacttttcaaatgagtgccaaactgagcagacatctgacaacaggacagaagtgtctgccctgcctagtggcagagcactaagaagggatccagtgacttggttctaaccatgagccagcaacctgttattatatactgcttcgtcagtcagaatcttttgggattacggtttcccccaatgggtattgatgatggcaaagtgtaatgatcctcccaccccagtccccaccctgcctggtgacacagatgtatcagggccatattttggtgtgggagacagacaggaaacccgaattccatttggacttcaccattcctgtacttgtggaaggtccttcctttcctgtgggtctcagttccctcatctatgcaagagaggccacactggggtatctgtaatattcctgagagattttatggtttcatgtgtccaaggcaaacaggaatagtaacatcaggaaatgcttctaatcttggagtaggaaatttacagcatctctctcctttcctccatccccacccctgcctgtcttctgtctgaggtgtggctcagttgtctggccagcaggacacaaggatgggccagcttgctttgtgtgagtacctgggagatggaaggcccaccctgtccctagtattccatgctcactgacaccctcaacaagtcgacttagtttgtagctgcacattgttaaaactacaggtctcatttctcccactcccacttcatggcagaatttagaatttaattccaggaaggaacgatcctgccatgtgaggtgctgcaccctgtcatggaactgctaaggactgagtatcctgacgtgcgtgtgtgtgttcctgcagagttgaacctgttaaagcgcctcggcaggtgtcttctccattgggccatgtggatacagatgatgatcctgtctccctgttaggagaggagcaataggatgatctggctgagccattgtctctggcctcttctttttcttctgctcttggtcagtcctctgttacaagggaagcaccaggaagccaaacaacaaggttgaccactgcaggagagcagatagtaaagaaaaaaaaaaaaaaaaaaacccttctcagggacatgtgcgaccactgcagaggagcagatagtgatgaaagaccttctcagggcctcttactttatagcacacaaataatgaattgctaattttagaggtttggttttttttttttttccttctttacaatggcatcttggatgggaaatataatgacccttctctgtgtcccctgctctatcagaaatgtcttgtgtaaggtatctgtctttgtggcagaaactggagagcgatatagctgagtgtaaccagtcgaatatgaagggctcccacaggctcccatgtctgattacatggtggtgctgagttgagaagccacagaagctttgccaccgtaggcttacttgggggctatgggccactggagacagaccttgaagattatagcccagtttcacttctggaccagtctctgtttctttgtcaacaccacgtaagaagctgtggtgtaagcaccctcagccatagactgagccactccagtctctgtgcctaccattgtgatggattgagtttcccgaaatgtaggcacactgaagccttccttccttaacttaccgtgatcttgtcgtagcaacaagaagattaacaaaaattaactaaggcactgggccagcctccgagacaattttttttaaagatttatttatttatttattatatgtaagtgcactgtagctgtcttcagacactccagaagagggagtcagatcttgttacggatggttgtgagccaccatgtggttgctgggatttgaactccagaccttcggaagagcagtcgggtgctcttacccactgagccatctcaccagccccgacaatttttttttaattacctcttacatctggatgctgaccctctgtgtaaccaggataacatgccaggagttaccagtgtacacaccccatgtggggcacacgtcttgtacacagtagacgtgctccgtccgtctaaatgaagacagacgggcttttatcgttctcctactgactctcggccctcgaaagctttggcacagggcaaattccgttatttgtgaatggcctgggaagggtgtgagttagggctggagagaaaggctgtgaggacccagagagtgagcaggggcctgtgcagctcagaaaacagggtccccagttttcatcctgtagagatatattgttgacagatacacatcctcttccaactaccacaggaggaaagctgcagtccctactccatatctcctagcccatgcctcttctagcctaagcaagagtcgaaagatgttctgccccatagagctgcctctttcggatattttacaagactccagctgtgtctggattctttgacacagtgtttttgaagttcaccccctagtataccatccccctttctttctatagctaactgcatggtatagaccacaccttcagcaatccactttctagctgatagatatttcagtcatttctgcttcctggatttttttatgtttgcttgttttttggtttttgagacagggtctctctacctagccctggctgtcctggaactcactatatagaccaggccggcctcaaactcacagagattaactgccactgtctcccaagtgctgggactaaaggcatgccacccctacacccagcatatggctacatttaataatacttcaataaacgctgtatacaagcttttggggggatagaagcacccattgcctcaagtgtgcacgtatatgtagaattgctggtaaggcatctagttctatgtttaagcttttgggggaatatccattttgttgttgtttgttttgttttgtttttgatgtggctggagcattttacactccctgctgcagttgttccgtgtccttgccaacacttgttattatgtgcttctcatttaggcgtttctgtgggtgtgaagtggtatctcatggctttgattagtattttcctggtggctcatgaccttgggtgacttttcatgtatttattgaatcctttatatctcatctagggagaaatatcaattctaatctttttgtattatttttttaaaagattatttttattgcgcttaaaaaaaaaaaaagacagggtttttctgtctgtagtcctgactgtcctagaacttgctctgtagaccagctggcctcaaactcagagagatgcctggctttgccacccaagtgctgggtcaagaggtgtgtgccatcaccacttggccttattatcgttttttttttttttgtttttatttttgtttgtttgtttgtttggttggttgggtttttttcttgagacaggatttctctgtgtagcactggctgtcctggaactcactctgtagaccaggctggcctcgaactcagaaatccacctgcctctacctcccgagtgctgggattaaaagcgtgtgacaccactgcctggcttctttattctactttttgagaaaaacttttatgaagacatggtattctttaagtttgttagaattcgcttgccatctggatcttggtgtttccttgtgagcaagtttgctttgttttctaataactcgtttaatttcttgctataggtctttctgagccatctctccctcttgctcttcctagtagtttctgtttcactagaaatctgttcatttcacctgtcgtccagctactggtgtatgaccatatttcttcataccgccgtatacttccataaggtctgttctaatgtctcacttctgtttatatgtctgtgaggtttgactaagtctcacttctatttataggtctggagtttgagcctctatttttctctccttgacttgtctggataaaagttttttgctctgtgatcgtctttcaaagactcagtctgcctacctgttactttctgcctaaacagctagtctcctaggtgcgaccccttgtgtcttcctgctcatccattccatagcattttttgatccccctttaagttctttcttgaccactttgttgttcagaacatgtcagttctagaatgtttttttttttttttttttttttttagtttccccaatttctgttactgatctctaaaaaaatagacactacatggattctgttctttcaactttaatgaggtttgttttatggcctggcaaatgctctgtcactgaaattcttcatgtgtgcttaagaaaaatgtgtaacctgctgggatgagcggagtgtcctctgcgtgagttaagtatgactggttacttgtgttgctctagtattatctccgtgtttgagctatatccatcttctctgaaaataacatgaggcttgagagaaggctcggtggtttggagcactggcggctcttgcagaggacctgggtttgattcttatcagctatatggtggctcacaattgcctccaactccagttccagggaatcagaagccctcttctgacctcctggtgcatatgaaatcacatgagcacacacctacacatgaaactaattaactaattttttaaaaaagtaggaggcagaaatgttcacccgtttgtatatttttattgtatttctctctcccattctgtcggtttctgctttttgtgttttgttgttgtattgctatgtgcatagatttttattactgttgtgtcttctgataaattggccctcttagtattactaaatattctttatctctagcaacattgattgctttaaagtctatttgggggctgtggatgtcttaggacttaaaaatacatgaagctcttcaaaatgatcagtgtggttcacctgaaattccagctctaggggatccaacagcttctagcctgtgtagataccttcacacagatggccatcatacagacatgcgcgcgtgcgtgcgtgtgcgcgcgcacacacacacacacacacacacatacacacacacacacataaaggtacattttattagaagcctattttgatgtcacaggcacccaacagctgtcttgtgacagctgaaaagctgttttgagctactacacacttggtggacagtgtaagttctgtgaagaacttgcctccttcccttttcttgctgtgtttcaatttatttattttttttttgtttttttttaaaccaatcaacagaccttccttgagtgttaggtataattcacggcacatagtacgtagcatgtagttgatgcccacatcacagccatcttcgtgggattggttaatgatgtttttttcctctccacctgctcaactgttgaaaaccacaccctcctcagggtcctcagggtcctcacagccaggacttggcagctaataaacatgaaagggaagataatcaggggaaagtgtgcacgcacctttgaaatgtgcttgtgctgggaaataggatgcttagtgtttggatctgctttcaagtaaaagaaaaaaagggggcttttcaattttgtgtgtgtgcacacactcgggattggggtagggtgttattcacctgcagtgtatcagtcagagctggggtaaggttgacattctccgcactgtgtgccttaagctgccagcacgaaatacaggtcgcaaaaggaataacaacaacaacaaaaaacaaaaaaacaaaacaaaacaaaaacattaaaaccagacagaattccagtctgagcaagggtctctgatccttccctgattctaagcccacttggccttacacattctcccacggtgcaaggaaaagacctcatattctgtgccaggttcctgccactgctttgagctgtaagggctccgggtgaaggttttagttgtttggatggacacagacgtttgcagttctggtacctttgagtcctagccggcccattgctggcgttgaggctgacctctgggagacaatatctacagtgaaattaagtgggggaatccatagaagagaaaaagaggttcacacaaaaagatgattccatttccccttgaaattgccgtttcattagccaagagcctatgtcacccgtgtttactgtttcctctacaaactgtttgtgtccgtccttgtgctttgtcagaaagggtcatctgagaggacagtgagttccattgaaggatttgcagttcagttcagtgagttaagcgctttcctgatgtttagcttcggggttcacaaaagagaaaagaaacagggacttgcagggagaagagagggtcgccctgctcctgctgggtgtctgcctcagcaacttcatctagaggaggagtccggtcaagcactccttgtctgcactgcttccttttctctctctctcctcacgatgatctctgcccactgagaattcctaagcaaccaacagtgagcattgttaaccgtgtcagtcaaaacgagagccaatcaatgacaaatgtattgttgtcctcatgtgcaaatggatggcgctctctcattggagttttaacttcaatggctattattaaatgatatatgatcattctagaacaaaccaacaagtagaatagcccagcattagaggcagaggaaagacgatttctgtgagttcaaggccagccttgtctacatagtgagtttcaggcgagccagagctacatagtaagactgtgtctctgtgtctgtctctgtctgtcagtctgtccatctctctctatctctgactctctctctctgtctctgtctctctctctctcacacacacatacacacacacacacacaaatagaagaagtagagagaggagaatataactcataaaactaaccccacagatatccccgccccacttcctacacacctgccccccaatttcttcttaaaaccaacaaacaacaacgacatcatcaaaacaaggtgtctagctgaggctggcctttatcctgctttcgtgattgggctgtgcatgcaccacaaagcctgaagtggtgctaagtctgaaatctgtgtgtttctagggccagtgtgttcgtccctcccccgcctcccaatacctgtcaggaatccgccatcttcttctaccacttcctgttccagtttcccagcattctttggcttgcaaaggtcccatcagcttctgcttttgattttaggatttgtattatgggttcagggcccacactccttagcttaagtaattatattaactgtttccatataggccccattcagaaggacaaaggacctcaccagtcccactcataccagccactgggcagccagtgtcggggtttgacacccatcactgctgacagctcgtttctcaaaaactctgttctgttagcatctggttttgagaggaccaaccaccagcaggtctgggggctcttccttcttgcacacaggacttctggccaccaaaggctgtagccaagtctgggagacaagaacacagtcttgaagagatcattacttgaggatatcaatggattcctgaagacaagagcaaggtggacagggaaagtgtttctaggaaaatcttatgctcgctctggttccctgaaagagttacaagttagaatcctctctctaaggggcaatgccatacttttaaaggagatgttttggtgatgttttggcaaaggcccctccagagctctctgcaagcttttcaattagcagataaaccttgtatgttgaagaaacagccctaatcgcctatgaaatgcatgcatgtctcactcattcctaggctactgggcaaggtctaaagccttcaagtggtatccctgccattcaaatgatactcccctgagtctgcggacttcttctgccttgccctagctcttccaagcagcagcacctgtgccttcctgatggtcacaaaggccctggaaggtacttccctggcacttaacatagctgagtccccacccccacccctttctccctccttgcacttcaaaagcatccgtggaccctgtggcctcactgcatattaaggagtcagtgtaaatcccaccaaagccaagaactgaataagaaactacactgctttgggggacaggcacatagaaggctaggttcagagcaaagaacagacttctgcacaaagagggcatggcaggcgtgactgcagccgagtcccagggacatccccggctacagcgtcttacgtgcatatgttctcagatacttatatgtgtggttttttccccccctcattcagatgcagggagtcctttcatagagatgcacactgacatacccaaacttgtgcacatgacggaaggaagacagctcatcatcccctgccgggtgacgtcacccaacgtcacagtcaccctaaaaaaggtaagactcaacaacatcactcctggcgtggtgttggcttcaaatgggtgttgttgcggtttgtttatttatttatttatttttttaatgtctctggaaaaactttctctctgggcttctcagtagactcgtctggagcatccttttcctaacaagaaacatgatgaggagtttctgccccctccccttgtatatttaaatggagtcaaatgataacatcatacacataaattgaaataatgaacgaaagaaccaaaatcgtgacagtttggatgtattgtcacatatccaaaagggaaagtcagctgtgttgttcacgtggaaaagctggtgtctgggtagggtatccactgcccagggacctagcggcagcttatgccatcatctgcccccacccccacctgccaccaccaggtgtgggtggcatataaaacgactatctgccaccccagttctacctccctgtccccacgtgttcctggctagtctctctctctccccttctgtccttctctgtctcccacctctgccctcgtggctctgctcctgtctgtctgcctctacccgtcctttatactagatctgttgcatggccatgggtggtactcaaacttaacctcttagggaaaaagaaagaaagaaatctgccaggcgtggtggcacatgcctttaatcccagcactcgggaggcaaaagcaggcggatttctgagttcgtggccagcctggtctacaaagtgagttccaggacagctaggactatacagagaaaccctgtcccggccccccacccccccacccccccaaaaaaaagaaagaaagaaatcaatccgtgagactcctcctcaaactctaagttgcatattcagaaagggaaagatatttatagtgcagcctaacgaagatgcaactgaacatcaaactcatccaaagtaggggtcagaggctcctggagccccttacagatgttcccatagagaagctaggagggtaaggaccagccagccccacccccactcctccatgctcacccaaggcagcacctagtcagtccacacagggaggtagctggcaagcagtggctgtagttgggaagtcagaagaactttgtctgtgattcatcagtgcctggagtatccctcaagaacaggtttgaacccccatcccatctgtggcctgtggcctgtaggtgtcagggctgggaataacaggggagtcttactcaactgcccaagaaaattcctaggtaacatgttgcaggggactcatggtcacgctggaccatggagtcaagctcgtgacttcctactcagtgttcctccttatgtgttcctctactgtgggtaaggggggctggaattgcagggctagctagttacaataccttatttgtgagttgctgtagattctagaatgttctagatgatgacaacacatgaagatgtccctctggatccagtggacaagggaggtggagtcgggggggattgtctctcttcagcaccaggccatcttgctatgtatgagaattctcaacatcagcctgacgaggcatctgggtctgtcacagacgggtgcagcttgtggccaagaccagttatacgttgccataatccatatgacttagcaccagcaaaacatatttgcctctgcacaaaaaaaaaaaaagtcaagaagtcatgggaacaaaccggcgttttgacctgtgtggtggctttcatgctaaaagagaagcatgttttctcgtattgtgttgatacagtcagtactaccggggcggctcggctaagcgtcgcttccttctttgcagtttccatttgatactcttacccctgatgggcaaagaataacatgggacagtaggagaggctttataatagcaaatgcaacgtacaaagagataggactgctgaactgcgaagccaccgtcaacgggcacctgtaccagacaaactatctgacccatcggcagagtaagtgttggctgtcccgtgggtgtggccaccaggtcctccgaaatctacgaaactgtcatccttaacatttttccccctcttgtgcttgcagccaatacaatcctagatgtccaaatacgcccgccgagcccagtgagactgctccacgggcagactcttgtcctcaactgcaccgccaccacggagctcaatacgagggtgcaaatgagctggaattaccctggtaaagtgagtgaagagttttctagttctccctagacgctcaccagctgctttgagcaagtgaaaccccactgggtttttgaagtgggaaaacttagaaaatcctgctcccaggcagggcggtgagggtggacaggaaagcaagcggcaggcagttctgaatggtgcctccctggcctgctgtccctgaactcgatagcgcgcagatcctggctttgatgtctgggggtttgttttgaagggtactggctgctgtttccactggcgagtctggaaagtgggagggagtgttttgtccttggaaacggtgcgttgcgatttcaagatgagagaatttatcactaaataccaggcagggactatcttctgtcataacaacttttcaagagattgtctttgtcagtgcattcgtagaaggttctggcagtcagtcaggcacctgactgcagtgtgtttgctaaagatactttaaactagccatccagtactgcatttattgattgtcaaaggggcaaatctgtccttcaaaaaaaaaaaaaaaaaaaaaaaaaccaaacccgagaagaatgaagacagagtcggtttccctattcaggtgaaacatccttgcaaataccggttatttattgacgtacacagatgggaaagcaatgataagctggaaagaacattctggcagcaagcccgctctcctttctcatgtgccagtgtgatttatgcagcatatcccaagggcaggtgtttgctatgttattcagactgccaatcaaaattaatttatgattaaataataaacaaaagattaaagcctcagctccaacctgttttcaccaacttcccccacccctcctcctgtggaaatagaaaagctttgcagcaaaagatgtaatatggacccagtgggagttctattttctagaactactgttcttccatttaaatttaaataaaagtgctgtaacatgaagcaatcacttctgacagaaatgaaatattctcaataaatatcaagagtgaagagaactttacccagttcttattgctattaagactatcgaaatgggagatggaggaaagcgggaaggggggctgaagagatggcccagtggttagtgctcctctagaggacctcatttcaactcccaactcccacatggcagctttcaactgtctgtaactccatcccaggggatccgttgcaccaggcatgcacctggtgcatgcaggcaaaatacataagataaaataaataaatctttgagagagagagagagagagagagagagagagagagagagaatattgatactggggggctggaaagatggctcagtggttaagagcactggctgcccttgcagaggaactgggttccattcccagcactcatgtgatggctcttggtcagcagcagtcctagggaatctgatgccctccttagatttccccaggcagcagacacactcatggtgtacagacatacatacagacaaaacacccataaacagaaaatgaattaataacaatttaagcacaatgtcagtactatacctaccaagcaccaacaaccttctaaaaacggcactgtccaatggaattttttgtgacaggaatattctatgctcgtcctttacaataaagtatccattagccactatggcagatgaacacttgaagtgtggccagctagctacggggagggattcttcatcctgattaattgtatttaatagccacgtacagctagtggcttcagaagcggacagggcacttgtaggggcccggataagatgcttcccaaagcacaagccatgccaacaacgcacttgggaagaaaacccttcagagagggaaagtcacgcccagatggagtggcagaaaggctcctgtgcctggtccactggggaccgattctgacttctcacagcattgactgacatctacgtcttttgttgtttctgagaaagatgcagatggcctaaacatatgtccctgaccatagggaattaaaaggcaggtgggtgaaagttgactaagcatggtagagggaactaggtttaagaccctcaggtccgtctggacggcttccatgtcgtttcccacgaccctccccagggaaggacttaagaggaggaaatgacgcgctctgtgttatgcgaggaacaattgcaggagatggcaccgcatcttctcagaacagggagcaggccaccgtagccaatcagacagctgaacgttctctctccctgagataagtaagggataggaccctgcagatgatggctgaaactatctctgggtgtgtgcgtcccacacccacttacccagatttagcagaaattgatgagcattgctcaaggtgtgaaataatgaatgaagaggtggttgaagtgacttcttgaattttccttctcatcagtaggaaagagaacttacatttgttcacagaaacaccactgttgagtgtaaggggacaggctactatttggagatgagaacctgtactagggagaaatcaccaaacacatacccaagagaaccaagttcctcgtgtacagtggccagttctctgtcacttctacttcctcagtgatagctgaacaaaatctctccagtctctccaggtgctcgcagaaagcagctggcatagtgtatatgtgacgaccacttaaagagatgcagtgctgatccggaggctagcacacttcgtgtttgacgcacatctagacaaaagcgtagcctccaaatgatatgcttgtggtggatctgatgtacctaaccttgagaggagggagggagagagagaaaaaaaaagaaggaagggagggagggagggaggaagaaaggaagggagggagggagggagaaaggaaggaaggaggaaggaaggaaggaaggaaggaaggaaggaaagaaagaaagaaagaaagaaagaaagaaagaaagaaagaaagaaagaaagaaagaaagaaagaaagaaagaaagaaagaaagagaaagaaaaagaaagctgtcaaaatactgaattgaggggctggagagatggctcagcagttaagacctctgctctttcagaggtccttagttcaattcccagcacccctatggtggctcacaaccatctgtaatgggatctgatgccctcttctggtgtgtctgaagacagctacagtgtgtactcatatacataaaataaataagtaaatctttaaaagaatcctgatttggggaatgctaaaccattgtaagtttcagcaagagcaatgctgacttctacactcgctgtgtgttctctgtgtaggcaactaagagagcatctataaggcagcggattgaccggagccattcccacaacaatgtgttccacagtgttcttaagatcaacaatgtggagagccgagacaaggggctctacacctgtcgcgtgaagagtgggtcctcgttccagtctttcaacacctccgtgcatgtgtatggtaagctgcaaggtgaccagctgctggcctaagcagtccatccactccctgagccctgcaggcagtaacagtcgggggcggggggcaggggcggggagtccatgtggctaagagttatgcaactacaaatgaacactgctttctcttgcgccccgaaaggcaaatgaagcacactgggtactctttacactgaatgcttctgggaagggtgggtggaaagactgtaagagcctgagaatggggagggccagagcaaaacagtgtcttctggatgtgacagggttgctgcactcatgaattcatggcggccgggactgcctgtgcaagatcagagccaggcagcattcctgtatggaaaggaaagagaatcacaagcccatcccgctaaccatggacagctgatggctctggggatggggcgtgggggggggggggaggattgtcagttttcaatggcgtgggccccagtaggtcagtcattctccagtagatggtcccatacccagaagacgatggacaacactaattgaagttaatgggttattaactaaaaaaagaggacgtgaaattagggagggggtaggagatgggggcagaccttcaaggattcctgaggagcaagggagatgaatctgatcaagatacattgtatgaaagataagtgctagctttaaaaatactgctttgacttggggagctttgattttagaagtttacttcagctagtagcgtagacggtaagagggccgtggactcctcacttactgtccccatgtaaacagcagaatgtgttggccacattctttatcactttatctaggggaggggggatttccctgactgtcccatgtattggggctggcctgtggctctcatgtccgggttcgagcctggaaggcatcttggaactggaagagaagagggaatctaggctggtagagaaataatggaaccaagacaactagtctgctcaaggttcaaatttttaatggcggacacgctttataaaggagaggggaagaagcccattcctgccaaatcatccttggagcccagctgcaggtgaccatgtatagtctccggcatagataggccgacttccagcaggtagcagcagcggcagtgacagaacaatagagtgatccagggaggcaggctccaccctaggtgatctccttagtggcaacaaagtcaaggtctggctcagcctgcttcaggcttgtggatggttacacccatgaagttgatgtagaaaagtatgataaattactcggaattaatgctcctctaaccccccagtttaatgatcacgggatccccaaacggttgcttaatgctaagttgtaaattctgtaaggacaagtgaaaggccggagctgtctgttcttcgagttctcacagcttggctttacagcccagatcctttctccatcttccttataccagccgggtagatttagaaataccgtctgtcccttgctattgtgacagatttagtttgatgctcccggttggcaggtgaccgctttctgtctctagggctagctggcctgaaagcatcatctattgatgaacacttggattagatgacaggctccaccagttctcagtggttgatcgcgtgcatctcctcttagtgagggggtgagctcacgttcacagaaatgaatccctcccttacacgctgtcatttcttctctcaaagaaaaaggattcatcagtgtgaaacatcggaagcagccggtgcaggaaaccacagcaggaagacggtcctatcggctgtccatgaaagtgaaggccttcccctccccagaaatcgtatggtaggactgcaatcatttcagtgtcacttaagacacttttcataagcgggaagatgatggagttgagtgactgacactcctgaaagagacactaagagaaattgtacacaccatgttggtttctgggtagtggctcttggggagagatggatggacaaggaagcagtgcccaggggtaggtaaagcaagagttgagaggcttgcgtgctcacacatactaaattcctgcttctcaaaaccttcctatgatgtcaacgctctctgagtgagatgtgttgggcggccactcagaggcatcttgaatgtgtagcatgctctattaaccccgaagaagtgggcccttgtaacgaggaggccaaaaataattcctttctgtgaggctttgttgaaagttccagctttgttttaaaattccaacaaacattaatagtggcaggacttgttcatttgtaggtgtggacaagtggacctacttgaattaattatggttttctttggcttgcagtttgcatattcagaaatgtcttacacagtttttttttttcctttaaaaagtcaaaccagtataataccactgtgaaacaatgcaatctgtttagaatctgcagtcattttgttaaattactttttaatgccattatctttggcttaaatcactccattttaaacaaaaggtttagccactcacagttgattaggaaaataagccatatgacacagaagctccaccattctggaaaatcctccccagagcttgtggcccccagccctacagggtttgtttgcagcaaacccaaatacttactatggaattaaagaacaaattgcaactctatactctaccttcatagtactgtagtgggaaattaacagatatttttgtttcatagtatctaagaagttatttggacttcatagttgtcttgaaacacatacaaaatataatttaagaaatgaaaaagtattaaatttaatagaaaagtttgtaacaattttatgaccagagaaagcaccctcactctctcctgtctgaacagaaccttcgtctattcatgatttccttagtgactacctagcaaggaacaaatagaataacataatccacttttgaaatgctgtcttgttgataggacataactgaacaatactaaaatgatatttgtagtcattaaaatactgcatagctattttgactgccttggaagtgaggtccagagagtgtgtccccaggcctacaggcctaagaaccatttctgcctccttctacagcagggtgtactccctacaaatgacagggcctattgaaagaaatgcacatttaaatcagtggctggagagatggctcagccattaggagcactggttattcttacaggggggcctgaattcatttcccagcacccacatggagcttgcaacaaactgtaactaggcttcaaggcacccaatgccctcttcagcatatatgtatatgtatacatatatatacagatacagataaatatgtatatttatgtatatataaaatagctaggcagtggtggggcatgcctttaatcccagcacttgagaggcacaggcaggtggatttctgactttgaggtcagcctggcctacagagtgagttctaagacagccaaggctacacagagaaactttgcattgaaaaactccaataaataaagacaagtaaacaaacaaataaataaaatagaaataaacattataaaaataataaaatataaaatgaattcatagactatctgagttcaaagggctcctaagaacttctagaagcctgcagatagggcagagccaagccacctgactcgtctaaacagagaacatcaaggcattgattttactttcaaaacattttaaaactcctgttgcttggtgcctttgattgtttctctatggacaattggtgtgaccatttgtgtaattaataagaactccacatgagcccacaataggagcctctatttttatttttatcagatttagtggatccgacttacaagcgttctcatacttgaacttctttttgttttactttgttttgtttttgtttttcgagacagggtttctctgcatagccctggctgtcctggacctcactctgtagaccaggctgatcttgaactcagagatccgcctgcctctgcctccccagtgctgggagtaaagacatgcgccaccacgtccagctgagttcttgttcttctcatggaggcttaaggaaaacacttaacaaacagctcggtggactaagtcagactggaacctctgagttagttcttaagacccgatggccaccaacacccctaaggggacaataagccaccactttcttttcttcatttagcttagttcatcctctttgtgaataaagatgaaatgttacccagtctaaaaccctcgcctgcctttacccagtacttagtgcccaaagattttgttttaaaaaaacaaaacaaaacaaaacaaaaaccagtgctgatacccaaagactcaaaactaatccacttgaggttgtaaacagaaagggcacatgccagtcaaagtgacatcacccagctactgaagggactaacacaccatgctgttaactacaggttaaaagatggctcgcctgcaacattgaagtctgctcgctatttggtacatggctactcattaattatcaaagatgtgacaaccgaggatgcaggggactatacgatcttgctgggcataaagcagtcaaggctatttaaaaacctcactgccactctcattgtaaacggtaagtttaatgttcctgtgagatctggaccccagggcaaagttaatgatcgttttctggttcgaaagtcagtataaactatcaaggaaaacaaacttttttaaaaaaattgattcttgagtttattttattttattatatgagtgttttgcctgtgtggtgtatgtatgtatgtgtgccacatgcatgcctagtgtctgagcaggtcagaaaaggatgtcaactcccctggaactgacagatggttgtgagccagcctgagaatcaaacccagatcctcttgcaagagcagccagtgctcttaactgctaagccatctctttagccccacatacatgtttatattcttaaaccgcttctaatggttcggatggagttcagtagcagagcacttgccccctaagtaggaaacactggttctatccctagcaccacggaaaaacagaggaaaaaacgccacactctgtccctgtcataaccacttcacaatttctctgtggtgtgtgtgtgtgtgtgtagccctggctgtgaccaggctgtccttgaattcagagatccgcctgcctctgcctcccaaatgctgggactaatggagtgtgccaccacggctcaactattcatgttttcttatcttttgtatgcaaggtggcttttatgtctcaccaataggcatttttctacgtaatatgaccattttttgctcccctacccgcggcatccaaagccagtgtgactggtctctccagagagctcccggaggaagcccccggctctgcccttgacctcactctgcttctcttcctctctagtgaaacctcagatctacgaaaagtccgtgtcctcgcttccaagcccacctctctatccgctgggcagcagacaagtcctcacttgcaccgtgtatggcatccctcggccaacaatcacgtggctctggcacccctgtcaccacaatcactccaaagaaaggtagggacagttaatgtcttcagtgatttttcaaagaccaactagattctttagtggctggaagttaccagatgtatattggatttggggcagaggctttccctgtgttcgagcctgcagacagtaggtcttccttctcattggagacagacaccctacccttggctcatgagatcacaggaacatgggacagaaccacggtttcccgggaccggggagctgttatgtgactcagaattttcgtgcaccctttcccagttgagtagccctgccaagagctcttctcctccgtcagtcaccctggtctttctactcttcgttttcgcatccttggctggaatccaagttcttcgtaacacatggctaccgtttcctattttgggctcagcccatgcttttccatctgtctggattttgcttccacctattgtctgtctcctaagaagttggtttttttatcagacccccaggctcagctcctaacgttaccttccctgtgaaccctctggtctgcctcattccagctcacttctccctccacagtataggcggtagctgtcatcacgcaccatccttgttgtgttggcccatgtgcccagctgtcttcttccttaggctctggatcagccaactgcaatcgtttagcagatgcttggtataagcttgtacaatgaatgcaaccctaccctctgtcaagcgcccggcgttctccttgcgtcctgcccacgactgatccttgtttgttttgtctccggttgtttagtctagagagatgatacctgtgataattcatgggagggaattagaaggacaggaatagaatggccaagtacaaccgggagactaaaacactgaaagtacccgagggttaccatactcatctcgtctccgtgttgcttttagctctccctggaggatgctagggacgattgctattaaactaaagcaaacaaactcccaaactagcttgattaaaaagcaagcctgggataattctgtgatggctatttggttttcctggatcttcccgtagttgagattctccatcgctgtgctaatcccttgtttaggacacggtataatgatagtggaaagttactggtgagaggtggaattcatgagaagcagctatttccacataagtccgatttttcatttgagagtcattttctaagaatagaaatagaagttgcaaaatatttaggacttgtgaacatttcatggagaatacaagagaatggaccgctgtgattttttattatttggctagttttagttaagcatccacgcttggtggatctgcctcaaatataggcatttgtagtgaactggtgaaaaactagtcagtcaggatccaagtttagagttacatttttatgaactagcatagacttttatgcatatatttaaatttctgttttaacactatcaaacctaaagcttcaatgttgctcttaactgaattctaagagtaactatgttagaaaaaaattcagttctgaggtcaggacactgtagtatgagtttggggttgaatgaggctcatgaaatgaaacgagggggcccaggtggatgccgtgtgtagcgcctctctttttgatctctgcggtgtgcgatctttctcccattctgtgaaggatgttcaggaggtcctggaaagatgtcttactcctttgagaaaaaaaaaaaaaaacattgcaagactcagaagtattgccttaaatctttcttgactatttgaattatccttttaaagtcatcttactatttatttttaactttaacaattgacaagctagacatgtgagatagatagtgcctactatccttgattccttccttgaatcaggaagtgtctgctatgcttatttttgagttacatatttgcatggtagtctctatgcatgatcttcaattataaaaatgcctaatatttcagaatgattatacatatatgtaatagttatatatgtgcagaataattattagtgcttaaatctgagactctaattcaatatctacagctcaaggcctagtttattttggtgtcccaacattattaattgtatttccatgaccagccacttaatacagacaagttaataaaaaaagagagattcagaccacttgaatttcagcatttcctagaatctgacaaatattttaaaacttcagaactccaatggacctaaaatttcttagttaaaatatggcgcacgcctttaatcccagcacttgggaggcagaggcaggcagatttctgagttcgaggctagcctggtctacaaagtgagttccaggacagccagggctatacagagaatccctgtctcgaaaaacaaaacaaacaaataaaaaaaattgataaaatagttgatacaaatgaactttgtttcaactgagtaatactgtggtttttgtttcccctgtaattcattcttataaagcatttgtaatatgtcctggtggcctattacacagtagcatagctataaataacagccacatgttctataatgcaagaagaccgatgaaaggatactcagcattagtgacacaaatagatgagaaatgtttgaagagatggctatgtttaaacatgatacaatgtgtacgagtgtggaagtatcacagcaccacattacattggtggtttataggctataggcatcaattttaagaacaacactaagaataaagtgaggatattatgtaagtttctataactaatgatcaagaggaaataacagaagatcgcccatttccctatccgacatttggatggtaaggtgttcagagaaggagagaatttctggtgactgtaatagaattaaattgtcagccctgagtgaagtggggtttgaggactatttgtcttgatttttaaccatcaatagagacatctagttatttgctgaccctcttttgtggtagcttagcatcaccctaggcagcttccgcaggagtattacatgttggagaccctctacacatcatctgttaatgtaaataaagataattaaacatacttcacaggcagaggtaacatgtctggggagagcccacggtgacagagaaatctgagactgggcttttactagcatttggaggaccgcatttctcggagacccatactaagtccattctgaggaacatggagggaaatgtttttgcctacatcggaacgaatttcacaacatgggaaacgataatgaccatttctgaaaagtattggatagggatgatgggaagtcgaatgcaagttcactttgctataaaaatagaaatctattaagtctgagcggatacaagcaagtcagaggaagaaaaaaaaaggaactaagaagactaaaataaaagtaaaaggaagggcagagaggtgggcgggaagcatgatgcgactccctaggcactgaccacgctgctcatcctttcccacccggcaggaagtagctctgcccagccctgtaaggaggataaggcttgggcggggcagagcaagctggtgaaccagctgcctcgcccatagcccatacccaattgaattcacttgtcccttgattttaaagaataaaatcggagcaagcctcctgggccaaatgatactcttttacttatttttaaagatttaaaaaaaaacaaaaacaaaaacaaaaacttttttatgtatatgagtgtttatctgcttgtctttatatgtaccatgtgcatgcaatacttgtggaggccagaagagggcgtcagatgcccctggaactagacttaaccggcgcttgtgagccgttatgtgggtgctggaaatcgaacccaggtcctctgcaacagcagccagtgctcttaatcactgagccatctctgcagccacgggtaccactcttaatgacaagcccctggtgagctttgctgcagtgttaatacactcacaggcgaaggaagggttaaagaagactgtgcagggtgaagaggctggtctctatgacaagcgacagcagagggctggcaacaggagtccctctctgagatctggagttcccgagaggatgtgagagggctttgggcagtatctacctgtgctcacagtcatcatccctgttcagaggctgcttgactcctgtgtttcaatgcccgtgagaccttcgggtgaccgagtaatgggtgtctgagctcccgttcatctcatcccccaatgctttctgctacctaacgtcatctccccaattagtagccagagcaacatggtttttgtgtgttttcttcttttcactttttaagaactcaagcttgcttttaacgtgtggctgggtcttgactatatgacaagtcactctaattctctctcatcatctgccatagcttttggcaacttgttacaaacctaagcacacctaggaaagggggacgctcagctgggcagtcgcccctatcaggttggcttgggggcacgaatgtggggcattttcttcactgctgaatgacacaggaggacccattccctctgtgggcaatgccatctctaggccagtgggcctggtactatataagaaaggtagcagggcaagccagaggaagcaagctagtagcagccttcctccatggtctctgcttctcttcctgcccttggcttccctgggtgatggatcatgacttgaaagccaaataaacccttctcctggccccaggttgcttttggtcagtatttgatcagagcaataagaaagcaaccgtggtcacaggtttaaattcagaataataaatgacatcaattttataacagatacagtcacaaagcagacttttagtctctataatggagaaaatgttagacagcatggatttctttgcaaaatggttacttttaaggacccactgtgctggccatggtggtgcacacctttaataccagcacttgggaggcagaggcaggtagatcactgtgagtttgaagctagcctagtctatatagtaaattccagcccagccaggcctatacaataagatcctgtcaaaaacaaaaacaaaacagtgatggccactgaaatgttttaggaatcacattaatattgccagtatcctatacattgattttgcacatcatcagtggccaacccaaatgtatgacgtcagtcatcacatcacacaaatatgctgtagctactggccgtgttaattatcagttgccacttgttttgactgtgtaggatcaaactttcttggtggttacttattgcgcatgggtgtgtacccgcagatgatctattacaagctgttgtggcactagagacctagcaatcaaggaaatgggttctaatcctggcactgcccctgacctctgtggaaccctgactagttggttaacctgagcaacattctctctgtaaatggcaatggttggtgtctcctttcctctcattcccagggatggaagagctcaatgagaaaatcaccttaagtcacatgttcgccttccaaaaacaaacaaacaaacaaacaaacaaacaaacaaaactaaaaaccgggaataacatgccagctgatgttcatggacagttgctcctcagctgcctataaattatgagttaacttgaccaattaactggagattaatgacaaatgaacagaacattttaatggatgaaagcagggtgcttatgtaggtaatactctgcctgtgattcttaacacaggtaatcaccaagtaagagggggaacaagaaggcggggctggtgacgctcaagtacacttatgagagagagagagtgagtgaatgaatgaatgaatgaatgaatgaatgtgtaaccattcctccaccaccagcaacatcccacatacccactggtgcaagcctggaccatctctggtggccatggcccagcagagatgtaacacctctatctggccatctctaaaatttaccatgccttatttggcctttttcccatgagtcccattaggatggaaaagacaacactgaagtctcaatttgtagaaggctaaatcgtctttataactttcttggctaagctggtcagtggtctaagaaaaactcaacagacccccatgatggaccccaaaaaccactgtttctaaagctcttaagtaggtcactatggagtctaacctagttacatctgttagaagacaaataggcaacattattccctgccactcaatgactctttgacatcccatcgctgaaacacccaattgaggggctcagggtgcacagctagagaaagttcaccaattcaggactaagtgtcattcgccccttgctcctgcgggaggaagggtggcctacaaaatcagggaaagatgggctcggagaagggccgtcctaattgcattcctctattgtttatagttgcaaatctgcaagaaaagccggccagaatcattagggatgtgtcaggggtagctcgttccagagaatcatagtttgggcaccagcggggtgtgcagaacgaacaggatacaaacaagacaattgtggctggcagttaattagaaatgtcctcaaggacccaattgaatcggcggctggcaagaacgtggattagtttttacgctgccgccattttaggccctgtattctgctctcttccttcagaaggagagttttcagcgggtcagatgtctgaaggaagtggtcatctaagaaggctgtgtctgtgtaaatatgaccactttcctcctgttttaatatctactgcactgtccttcagtactctgagactttccacccaaggctctgacatcagtctttgcagagtgcgtctaagtccgagggctccaataagacattctgtagggaattttaattggccgtaaacaaaacctggggtccaaatgaggatttaagaagaccacttgcccaggcctcttgaactggacatttgagaccaaactcagccaagtaaaaccggccatctgatacaagagacttttatcagtagccaagagagtgaatgtccactgactaatgagacacttcttgcgttctcgtagataattgtgagacgaggaagcacccccacatactgcccaacacgaatgtccagacaacggcccttattaatatttcatacacagtcctgagaacagaagcgctacttcatcttccagaccaatgccccctctccacttgcccgtgctttataaaatctctctctttgcccactcttcatcctactgcagggaacccaacaagtaattgtttctaatgaattaactgtctcttacaattgctatcaaacatttcattttgtgttttgaattaagccagaacactgcgtcctgggcagtttgcactggctttattagggtcttctcagcagggtttggtgttgttacccagaattcatggtagcaaaaggaagtggcacacagtttaagaaaatgcctcgagaagttaggcagaggcttttgggttatctttggtcacatggagtaatgtttaaatgtggggtgaacatttttattgtggatgtagagagtgatgatctgaccggagatcctcatctagtgagtaaacaggctggaccctgtatctgtgctccgctgagaatcttttagatctctaactgttgacctggtagagttgtttgttgaaatattcactttagtggccagctttcatatagctcagggccccgttggcacaaaacagaacctagtgaatggggaagatggaaagaaagtagactgtagcccaagaggtacccacaatgcaacacccacccttggtcctcacctctacaccgtccctgtagctggtccttcaagtctacagagttgtctagaccttggcggtttgatgggtgtgtccctctggcatcaaaacctctgctcatctccttgtatacgtttttctctagtccacatggccactgactatgggagttgtagtttctcttgttctgccagaatgagccttaagctcggggttggtttctcagattagagactaaaaggaaagggctaaacaggttggtgctgtgggctgaggatggtactataggctgaggatggtagaacaagggaacattggcaagttgtttggaacttagctctgcaggtgggagcagacctttggcaggagcatgaggcagtgtggtgggtctgaatgagatgaagctggaagcagggtgggcagggagacaaagagctagtgagcccactcattgtacgctttgtccttgagatcatgaccctctgtggctttctcactgtacggtgggaggtgaagggtgttaatttctggcagaagagccccatttgctcacgaatgttctgggttagaactcagcaagcactcagcgccccccccccacccccaggccgtgtccctgtttccacttcattactatctgcaccccaggactgcatcaggtctccacggccagtgtttatcatgaggctgaccaaaatgggtcagccactggtgggtggctggtggccagttctgcagtttagaagaggggccatgtgaaaggtaagagctgggccctaagcacaatgagcaggctttggaatatcagatggaaaaggacagggatggagcaggggtgacaggggtctagttagagagggcacgcctcaaaatcaacacggctggctcatcagcttcggctccaggaaaaaatgaaaggcaccataggaaaggcgagccttactacaagctgcaagtttgggggtagagctgtcaatcactcccccttgctcccctggccaatgcctgggaagttctactgtcggttaaccagaagttcttcattcctacagatggcctttcacaggctccctactagtgctcatacctagcgtgtgtcagaggcactgagtccctgaaaaggccttctgtgaccaagcaccaagggtgtgaaattgaatctgtctgaggccattgatggtcccagccccatccctggacaatggcaagtgatcacctgccactgccttctttatgatctgcccttgggagagtggaaaagttcttggccaaatagaactacaatgtgggtagagatgattttgaactaaatcgtccatcatagccgctaggaaacatttggctttagaattccattttaatgttctttatagtaattaagcactggcttagcagaagtggcaagctcctgtatgtcgtaggcatgcattattaagttatcacagcatttctagggggggcagagattttatcactgccagtttccaactcaaggtaagcctggggttcaaggacctttttaggaaacagtcctggcggatgtgccggagaaagatgccatgagcagcatccagtgcattgggatcaggcggttgaaagcagttcacatgtccgtttccagcattgtgctcatgtgagctcgtgctttctcctccccctctctccctccccactaaaattaaaatggtgaccactcaggccttcacatgagtaagtctggtccaaagctggtttaagaagcccatgttgtgatatcacaaaagccagttgtgcaaggtgttaggatgaaatatggcctacagcataagaatgtaagctcaagatcgggctctaccacccgctgtcatctcccagctgtgggttctagacctctcggagactggccttcctcatttgtgcaatggagtcagcaatgacatggggaggtgggggggtggggaaaggggaagatgcatatcacacacttagtcctgtgcctgccatggtacgtgtgctaagattctgtgatggaaggtgcctagatcttctagggtaccctttaggcaactacggggtggctccactgccgaaaaccacagtccccaaagaggaccctatgtggactgactgtgagccatctcttgagaccgtccatgctggttgacaaatgttctcccaagaagcatgccagtgtctttgaataggtctctgaaaacttttcccaaaatataagaccagaaatatcatacagcctcagttacttgggaggtcagtggagttacagccacctgcgtctactgtatccagtccttcttcagccataaaaggttcagacgcctgccctgtgtaacctctggtagcttacagctcttggtggtttgctggtgcattctccattgtattctagtattttttttttccataaatttgacctgtctctttgatggacaaagccatccttcaatagcagaacaaagcaaaccatgtgtttctttcaaaagacatgggaaagggatgtgcaagggaaaaaaagggggtaatttaaattaaagtagtgctggtaactgtgagccacgacttctgcctacctgtgggagatggagaagaccaccactggtccagcttctgttttttcattaggccataagatgcctctttcacacgtcagcatccctgtctgccttgagactgaccaggaacatcactttgtcaggcactgatacagccaagctggctttatccaggtccccatcagatccgtcgtcacttatatttgtcactgtgagtggacggacaccaatggtgtggcacagtgattggtttaagaggtggtctgaggtcatctgatggtcactagtgcctgtcttctcagcacatttgaggtcagtgacctatggcagtttggcgcctgataagtgtaaggtcacattaggattggccattctgtcgggctcagtctccacacttggcagcgagctgagcccaggtgggctctctagccaatgaggtcacactgattagtaagacaatccccctgctcccgcgtagctatcagtgcaccagatgacaagtaacgtttccagtctggttttctgtgccaggcacagtgctaagccacccattcagtagccatgtcacaattcctcatagcaaagggaccatctttaaattgctcaagcccttcctgtttgctttttaatgcctataataaagtcacggtagcatggggttggtccgttgctatttgcaaggattctttagccctacgcctgggtagaccagtaggccaaaagtgttacacccagataataacctcaataaaaacattgactttcttcattcattttccttcttcgtgaaggactatttggtctgctgaggaagggtgacttttataaagagatctttaaggaaatgttaggagtggctaccaataatatcctttaatacactcaggaaggacatgcaagagggtgctccaatcactcagtgaacatccattgccatagagtcagaggtggttcggatgcagtactcgggaacaaggcagcggcaataaatgtttgcaatagtgagagctccagggggattcaaaccaggctaagatctgagaaacagcacttctctcaggctctctgggcatagcacggtactcctcagtcatgtttctgccacagtgaaggcctcagggctagtcattcggccatctctctgtgttgtccaatgacaggagcagaattgattgtgatgttgtcatctgtgaccctaagacaaaaaaagcttgaaatcattcaagaaagcaaaagggtcagaaaggccttgacaatttttctgtgactgtcattcctatactcacattctcaaagacatctgctgcccaaaagccgccccctacatcctcccagctccgccacccctgtgctaaaccatgaccccatgccctaccgtgtagcacttaagctgtcttcctttctgcaggcaccaaacccagtgataatctgacatgctcttcactgagtgattggagcaccctcttgcatgtccttcctgagtgaattaaaggatattattggtagccactcctaacatttccttaaagatctctttataaaagtcacccttcctcagcagaccaaatagtccttcactaagaagaaaaatgaatgaagaaagtcaatgtttttattgaggtgattatctgggtgtaacacttttggcctcccggtccacccaggtgtagggctgaagagtcttgatcctagccctgactctcagagatcctggaaaggcgggggatgggagctgtccaagctcatgctataagccaagcacagaggctatcatgaagaagggaggcagaggcaggaagataggcctgagtgtgaatggacatccagagcaggaagcctagcaagccatgccactcatggaaaaaaaggtcttatctaaacaagggtggcccaggactctggatcccctccaccattgtccaaggagttgacccaaagcttacctacagtctccaaaactctctttgctaccaccctacccccacccccaccccactgagacaagaagcaattttcagtatggcctccagggcgtcacaaggtctctcaataaggtcagcccaccagagtccccttggcctgaccccatgaccaccctgaagggccaggctctcttcctgagctaagggagcaggaaccattttgtctaaacacgccttccaaccccacgcctctcctgccagcatcctctccccggattgtttcatttaagaggacgtgagaggagggaagagtgttggcagagttggtcaatctgttgttcctgatgcgctatcaccagtgttttgacataacacccacagtgagatgtttacatcaagccctcccgcaggatggaggcttttcttctcctttctggtttctgttttgttttgtatcgatttcgctaccctttttgtgtcctaccttgaaatgattccgtgttctctgcagtcgcatccctttttgtgtcctaccttgaaatgattccgtgttctctgcagtcgcatccctttttgtgtcctaccttgaaatgattccgtgttctctacgatctcatcttggttcttaggagcaatgaactctcattaaacacatcagcactgttcgtgcccatcctcagagttcactagccagaacagaatcaaagaaacagggagaatatttgggttggggggggggcattataaagctttctagagtcttggtttttttcttccttgattaagttttaaatatacatttaatacatttgggcaatgatttaggcttaatgtaagcattcagtaggtgctggagtactcagctcagttctttaaagtactgaagttgtgttaaaagagatgcacgtgtgcagattcactcagttctgagcctgtaccacatcttctcagaagagaaggctgcgtcaccaaaagctaaagaacagatgcaagttttagatgcgaggagcggacaggaggcacagaggaaacctgaaaatcaatgttgttcccacccagcacaaaaggaagagcaggggtgctccggagtgcacagtgtacatcttgcttgtgcgtgttagagtcaacagggaataaacttgccttcaggaaccatagaatctgtccactcagagagcagtatataagaagaaattgcacacactaagatgagcaatgtttatcaaaacctgaagaaaaaaaaaagggaggggggcttaaaaaaaaccccacaaaactccccagtgctgaaatggtattaatataggattgtgaaggcattcttgatatacacaaagaagcattgaggggctgacagaatggctcagcggataagggggcttgccacgtaggcccaaccccatgagttcaaccccagaacccacatgagggaaaggacagactggcagactgagcagtgttgccccgaccttcatatgtgctctgctgtctgtgcacccatgcaaattcaaacacacaacaggaatgagtaaattatcttaacttctaaagaaggagccccctctggaccctccccccccccccgccccaaagcacagtgatgtcttggtacgtgacaaacatctgcgggtgtcgtaacatggaagggttaagtgtgatatttggaaatgtgccttgaaagaaaagcagattctgcctgcagaggcactgtctggatgggagctttgacttgcattgctattggggggggggcccaacctgcctcctgtttggagttataaagagccagggggaaacagggaacagagcaacctcccccccccaaaaaaaaagaatctaaaagagaggtctctgtcatctgcaccaagaggtcagcagtccccactgtgtgtcagaagaagaacgttagaactgggacctttgagcagtctgagttggagttaggcagactggcatgttgtatgtagggctcagctccatatgtcggtacctaatcggctaacttttaatttattttaactggtctcttatcctaatgaaacatttcaaccccagagcagcggacagagatggcacggacccacacttgcccccagaatgatttttttcctttggttggttataaatacctccatctcattgtgcttgacacgctgtatgcaaatagaggggggagtcctggggctcattgggggggggggctcagagtactaggaggacagagccgagctgataacactggccttgttcagaatagtgcatgggagctttcttatctcactccggcaggagctgccgtgggcttcctgtgggaaaccaggggcaagctctgccttcctcttgttgttcgccttccgcctccctcaagactgttcccagcaccgtggttatctttgtatcttcaaacatggcacactctacttcctcaagagcttgatgtattcttaagacttaggcaagtgcccctcctccccgcccccaccccaccccaccccctcccccggcctcttttcaagtggtggaatggaggcaggccctcaatgacattctatttttatggttcagtgacaaagagggaaaaaaataatagcccctaaattagaaaagagccacaggacctgtccttttcgttcggaggacctggcaagcaagcggagtctgtggtttccacctagggcttgagccttggtaacttggtcctcacagacaagaacagcagggggtgaaggggctcagagaccggtggccccaagtgagctgagctgactgactgcatttcccttgctttgctccaacatgttttgggtttggtttggtttggtttggtttggttttttgttttgcatttcctgaagatggggtgtgagaagttttaagatctttgacaaagactccccttgtccttctcaatgcttcaagggacacaagaaggcatctgaagccttcttgtccagtcagaagagaacttgagtggctgaagtcacagccctgagggcacacacagatggcgtgtgctcctggaggatgcagcaagcagtccctagcagtttatgataccgatgctgtgtcctacaactcagaacactgaccatggaagccgaggggagtgacatttatatgctcatcctggaactctagtattaaaaggtttctagtagaaaagaaaaatgtctgactttcctcttgcctctgtttctttatattaaccaacaagggcaaaaatgttgcctggtgattacaaaacacagcagaaatctcataagcaatctaaggaagaatggcctttgtttgttggttggttggttttgtatttttgttttaaatcttttcatttacctataagtgttttaggtggtggtggtggtggtgggaattgaacttaggtatttggagagatctagcgtatggcctaggtacggaattcaattgttgaaactgtctagttataaaggcggcgtgtgatttagaagatgtggctgttctttagggatcccccattgaagcattacatctaactatgagaactgggcatcggtgggcaggggcatggctcactcatgtaacctgagcccagggttctatccttaagaacataccacacacacacacacacacacacacacaccacatacacatatgccacacacacaccacatatacacacacaccatacacacatcacacacataccatgtaccacacacacacacatacaccacacacacataccacacatcacacacataccacacaccacacattcccatgcacagatacacacacaccacatacataccacacatatacacataccacacatacacataaacatatacaacacacactatgtatatacacaggtatacacacaccacacacatacacagaccacacatacacaaacctgggtggatagatagcatagccacatctggccagtacagcacaggagactattccgggtcatacaatggaagaaggagacctgaacccagcagactgggccctttaaccttctagagttacttcccagcccaaggctcctgaagggtctcctatcctctctatccctctctcttttctgctttcccctcccacttttatttcctgtaactcctcactgttctgggctacttagaaactggggtttaaaattcctccttgtttgagactctccagcttctgcctgaatcgtgttcaggtttcaagcagtgggctttctgttcagcaaaggttctagaccagctgccaggaatactagacagcaaaatgctcaaaatgggagagggggaacggggagagatgactcatcggtaagagcactggctgctcttgcagaagagccaagttcaattcccaacacccacaaccacctgtaactctagttccaggggatctgatgccatcttctggcctctacgggcataggcacatgcacacatgggttgcaaagacacgtgcatgcgaaacgcacatacacacagactaaaaataaataaatgttattttcaagattaaaagaggtcaacaccattggcactctcctttgataattgaacacttgaagcctaagaagttagggcttgctgtgatagcgccaaacttggaaagaaactaattaaatacaataaactattccaagatgtttgtttccatgggcactcccttagccctgagtgggaggtgggagtctaactaaatattttgacttaaagccaccctgtaaacatgtgaaataccattattttctcaaggtttctattcattaatgtaatatacacacacatacccagccctgttcacacgtatgcaaggaaacacacacacacacacacacacacacacttgaatgttacttccatcaactgagaactaactgaaatccaggcatcaggtgtcctaacttaagtattttctttagtatttagatcaggaaacgtatgtggcagctcacggtttgagtatctccctgctgggtagatagatacagttgagatttatagttgctagggaggaagggggtggccttaggtgaagaaggctctcataaagtctgtggttttctctctgaggacgtttcctgtccgttccacctcacttgccatccctggctgttctgggcagccttgcaataacctctctcttttgtaggtatgacttctgcactgagaatgaagaatcctttatcctggatcccagcagcaacttaggaaacagaattgagagcatctctcagcgcatgacggtcatagaaggaacaaataaggtaccgcttgtataaaacgagccttggggatagtctgtaaacaaactctcagctcctggttctgggtttatgggacccagaagtgatgcaaatgctcagagttcagaggggaagagaatctctgaggggtgtcttcattgctccacttgctacatttcctggactgtattcttcagactcctgatgccactcttctcctttctctctctctctctctctctctctctctctatatatatatatatatatatatatatatgtatatgtatatgtatatgtatatgtatatgtatatgtatatagagatagagatagagatagagatagagatagagatagatagatagatagatagatagatagatagatagatagatagatagatagatctgtgtttgtgtgtatgtgccatatgtgggcagtactcctagagtccagaaatgaatgtcagacttcccagaagccagatgtagaggtggttctgagcttcctctctcatcctcccatgtgggtcctggaaatgagaactgaatttgggtcctgtgcgagaacaatacatgttcataacctctaagctttccctgcagcctggggaactcattcttcttggaaatcaggctggttgcacattactggctccctatcccaactacacattcaatcttctatcagcattacagtcgcatctttggggtggaacctggagtccacacaagtgctgggattgatcgcatgtaccgccaagtgattctagccttcaactgtgcctgagtcctgctcgcagacaggaagtggcatcccagtaaataaaagctaacccaaagcttcacaccaaatttcaacattcctatctcagaaaatatcatatctgtccttctgtcccggccaggtgaagtctaagctagatgtgtaaacatacaccgtctatcaagattccccaaactaaccaagtctagtgtgtatttaagagctggtatcctgtgaagcagaaagtcccagtgggctgcaaaccaggaagctttccctctttgaggcagcgaaggatttgcttagaaatcagctatcattgggcatgggaatagcaatgcttaaaaaaccaaatcaaatagcctctaaaacatccatttacattacacatgctcatcttgatctgaagtaagggattatctgtataaatgccaccatctgctcaagtagggatacttaaaatatccatttattttgctgtgtccttgaattcgggaatgaaaagcagatacattgctctctatgtaggattcagcaactataaataacttctacactcttcttttctctttttaaagacttacttgtttttattttatatggacatgggttttgcctgcatgtgtgtatatacaccatgtgtgtgcactgcctatggaggccagaagatggcgcaggatcccctgaaattggtgttacagatgcctatgagctgttatgtaggtgctaggaaccaaatctgagtcccacaagaacaagtgctcttaaccaccaagccactctagctgccccatctcccattttctctttccttcattcttcttttttctttttctttttctttttctttttctttttttctttttctttttctttctcttttccttttccttttccttttccttttcctttccttttccttttcctttttctttttctttttctttttctttttctttttctttttcttttaagacagggtctgactatggcttgctgccctgaaacatgttcacagagatccacctgctctgcctcctgagtgctgggattaactgtatgcaccgccacgctaaccctgcagttttcagtatctaagcctttttgaagatgctaatgtcagcatccttttttggcaagccagtgtggttgtccccattttaaacatgggcaacctaagtcacaccacataaaagggaaaaaaaaaattcaaagcaaagtctcctgagtcaaagctcagaactttcatggccaactacgcgaggtacaatatcaacagtcacttgctagggacttaggaatggtttttatagacatagcagtagttgggatggtttgtagcctttgccccactaacacagtacacaggagctataaagttccatgttgtccagccaccagtgaaagactttaacgaacaagttaggtgagaaggaattctagaaaccgggatgtttgatttgggtagaaattgttcactaatgctagaaaatcacttagtactgccacacagtcctagcagacttcccagatgatgtcattggtatccattcatctttttgcttcttccggaccatgcaggcaaatgtcctattaatcctggggatttaaaatgagagacttgatgttcatgatcaaagtgggatttctactttgttttcttaccacaaaaatgtccagtgagcaataaaactgaatggggtgaagctgggtgagattcctgatgggcgtggccccatgtagttaactaactccagagataatgtctgctgatcaaaacaaaacaaaacaaaaccaagagagcagagaaaaacttgtctgaaataaaattaaaaaaaaaaaaaagtcttcaccaattttccattcaggctggaaatagatgtattgtcttgtggtcctgcagttaagctaaagatttccgatatgaacttctgtgcacagttggcatttgtaccacctggcccacgttcaggagctgcagggtcaaactcctccttctcccaaccaagggcaaagatgtccacatctcttaactcctccaaagaaatggcattagcggtgtttatcctacctaacttcctgtggtaaagaggagataacctggagagaggttcccctagacataggactttaacaaattgacaaccactaagattgcaatggagtcctccaatggccaccgtcacatgcaatgaagggtgtctattcaagatcatttggattacaaaacttttaattttccccataagggaagtgaaaatctatatagtgtatgggtcctttaagcagttctaataccattatgctggatataaatggttgatttcttgttctgattttaggagaacttactgtgtttagttttagcataaattagtatgtttttgtggtttggagaaaaaattgtcctttgttgaacagttagttacaagcatagttttgctgtttctaaattgcatgcaatgttcttcacgatgtagacgcttgcttctttggcgcactgtgactctagtacatcaaagtcctacaataatggctcagtcaccggtcagccttgccagcaatgctcctctgtggagaggtgtgggtggggacgctctcacgccggaagtcatggcggctgggggttccaggggcttttcgttgttgttgtcccttaggtcagtgaagggcatagagggaaatgcaattcccaaactccatttcctccttggcccacctttgtgagatgtgagccgttctctggagtggctaaaagcaaaaatgttaaattttcatgttgttcacaccagacgcaggggggtcgacgggactgaaatgagaagcgcacagagccctgagcagactttttgtaagactggggggaaggggaggggaggggtgactgcctctctgcgtttcggtagcgacatttccgtgaacttgtttgagggtacaggaggaaatatgtaaattgcctgagacaatcccatgacgtgtatgatcgtcctaattacggaactacggcttgtggtccagttcccacactgcccctggctccccctaattctcaccttctgttttcccatcacgtggttgttgtgtgtcagctcttccttggcctttatacacctacttctatttctccctgaaagacttagaagaaagcagtgttagaaacatcccaagattaaaatctctattccataaataggttaaaaaaaaaaaaaaaagcgtgttcccggaaattaagcggaatgacatattacctccattcagtctattccacgaggctgaagacaggacttactaaggcttagcaaatggaaggaaaggaaaattaagaaatccaagcttacagtagctaatgacaggtttttggttggttgtttttgtttgcttgcttgttttattttattttgtttctgggattgggggctttttgtgtttcaagacagggtttctctatttagcccgggctgtcctgaaactcactctgtagaccaggctggtctcgaattcagagatctgcctgcttttgcctcccaagtgctgggatcaaaggcgtgcaccaccatgtctggcttctggtgacagtcttgatgaacatctggggacatatcaaaggaccccgtgacaagcacagaacctttaagaatgcagagttagactggaccaaaaacctcaccttttatcttttttgatgttgcaattggctgtgttcatcctctgtagaagggcactgtggattttaagtgggagtgaggttgtctttccttctcctatgactggttgactatgagtgtcctaatggtagtttaccttaatgcttctgccttcgtcactggccctcgatttgcttcatttgtggaaaatgcaaactgattatagaattaatgcaagcagaccatcttgagacatcccttcaagtgtgtcctataaaataaacaattacaactccaagtatctgttacagctcaaatctttggcagtttctcttctaaaacataacagggacaatttggtattctgtttgacctttttcattctcctctttgttgtggacatcaaggatcagaatggtccctttaagacaagcagctcatgcatccttattgactgccccatgagaagatgccttccaatacaaccaaaggatgcagagcacagccttgcttaagctcctgtctctgacctgacctgtcttatgcttgtcaaatacccgccatggatttttgtcttgtttttgagacagggtctcactatgtagccttggctggacctcttcaatatgtagaccaggctggcctccaacacacagagctcttctgcctcctgtcactgggactaaaggcatataccactatacacaacctatatctttgatgttatatgaaaagatacttaattttataaccttaaaacatattccctagataaagaatataccagagtgaaataatttttaggaaagttgatcataataagttctatgtttcaccctgtgtttaaaaatgtttttctttaattagaatcttttcattcatcgatcatacttccaaatcacatcacttaaagaaagaaagaaagaaagaaagaaagaaagaaagaaaagaaaagaaagagaaagaggaaaagaaaaagaaaaagaaaaagaaaaaggaaaagaagggtggtggtttacacctttaatcccagcactcaggagttcgaggccagcctggtctataaagtccacgacagccagggctgtcacacagagaaatcctgtcttgaaaaaaatagaaaagttttcagtttgtgtgaaattctatcccagaaggaaaatagtgttcagtttatgctgctgattaaaggagctaccttcaaggaaaaccccattcaaatggtagacaggcctgtgtcaataggttttgctacccagtgtgaagcacttgggtggggaagcaatcaaaggctgagagtgtgagctctcaagttctacacaccagtacagatgctcttcccaggcatgtctgtggtctctggagtcctggggttcatcccttaacccctagaaaccttagtcaccttatttgtttaatgcccccatctcacggggctaagataatgctgtccatgttaccatcaaggacagcatgaaggtcccaccacaaagaaataataaacaccccacttacataatttctacactaacagaaaccatggtgagttcaattctggaggatgcccgtctgtgcatacgtgtctaatattggaaggcattattcaggcaaagaaaaatgtacttgaattatatctctttcttcataattcattgtatggcatggattcatatcacctccaggcatctcagctttagtctcagattacatgaaaagtctgacatggctcagcaagaccaaagctgctgcaaccatttcagacagtgtgggcaagtctaatttactgactgactttatgtgcatgattgctttgcacgtatgtatatctgcgcaccatgtgcttgcccagtgtccatggagatcagaagagggtgtcagatctcctgaggctacagtgactgtagctgaagttacagggcattatgagcaaccacgtgggtactaagaatcaaaccctgatcctctgcaagaacatatgcctttaccactgtgtcctctctccagcccactatgtgcaggactcaaacagggcaaatgtacatatgtagtctggcttctccttgccacaaaccccagctctgggttttgcaaaatcaaagtcattttaacaacagtataaatggtgactgtctgaaatgtcaaatattctcaagccaacaggcacagggtttctaagcagacaaatctaactaaaccatagatccgagttggaccacgatacatccgagaatctaaatgactctgcaggggtccttccagatcaacagtaagaacttaactcctgtaaggagcgtgggcttacgatgactgcaagcaggaagccctcagtgcagacattcatttctgatttcccgtgaagagctttgacatgcagctcagactccccagacaacacagggggtcacaatgcacttgatcgtcaatctgtccttctggctcccaccagctagtggctcccctcacactgtctccaacaagcttgtcttaccacagctttctacgtcctctgtggctctcgctggtctgtataataattaagagaaggcggctatcagaactcatatgctcccactctttgttaaagttagcaatcaaaagaaagagaaagagagagagagctggactctcagactcttctacagtggccatcttcctaccccacccacacccaactcacacccccaacccccgaagaagagaaagcatatgttggaaccttaagtagggaatgggccaaacacttttaaaagtcattggccatggggattgctatgctccctactgattgatatcccagcagtacctttacagccacgtgatgaatatccactaaacggagtgagaactaccacatagcccagccctctgcgttatctagaagtttgataacacacagatgatataagagtggatgggattgagcagagacttccaacaaccaagaaaccatttggggtgggaaatgaagaagggggtttgctgcctaaaaaaaccagaggatgctgtcagacttcctttcagatttacttactatgttttatatgtgtgagtgttctgcctgcatgtatgtacatgcaatatgtatgagcctggtgctcacagaggccagaagagggtgttggatcctctggaactggagttacagatggctgtgagctgccacgtgggtactgggaactgaacccaggtcctctgcaagagcagccagtgctcttaactactgaccacctctccagcccttgtttttagtctgcttagtctctagattaaaaacagaaatgtcttgatttcttagagacattgagagaccacacattaagtgcctacttactattacttcacccatcggaaaacgttaagtcccttccccaagaccagtccctcgggaatgctcattcacaaaagcacccggcatcccgtagtattgcatttatcttacgccaggacacacaaaatcatctaccaccctgagaacagtaccccagtctcacagaccatggctagttatttgtgtcgtaggacagactacaatctctgaggaactggaccaagttttatgtatttgtctctaatttgaagtattaaaaagtacctttaatcccccctcactacctattcatggcatggtggctttcaatggaagactgctcagcagtgtgtccatatttctaatttcttcttttaaaggaaacaatggaagtcttttagctgtctaagttttcaccttacgattagagtagacattatttattttgaaaagtacttccaggttcatatcaacttgaccaccatctggggacaatcagctaagtcatagctctaaaatgtcagtttatatcttcattttgtacataaagaattaaagtcctgagaatacacaatttataaacacacacacacacacacacacacacacacacacacacacacacgcacgactagcttagctttcaacttcctgtccctttcaagtccactgggggctgcgagccagaccccgtgagcacaaatgagaactggcttctccgccttctcttctctccttgcttgattctcatgcccatcatagatgcctcctgtgaccagttggcacccatgctctcaggtcacccacaccaggaaaggcctgggcctcacctgttcctctcacagacatggcctgaccacctcgtggggtgggacgtgcagttccacaccccggcttcaggtctgtgattgttgtggccacataccgagataagccccgaaaaccctcgtaggtcggatgtcatgggctccggtctcctgaggacctgttttcctgttatttttctattcgtagtggggctccaaagcagagagcttgctggtggctaccacccctgccataccctctatgtgaatggaacatctgaatcactccaacccttagccgctcgctcagggccgttcctatcgatctctgtcccagctgaactttgtgtcttttgcagacggttagcacattggtggtggctgactctcagacccctggaatctacagctgccgggccttcaataaaatagggactgtggaaagaaacataaaattttatgtcacaggtaagctatcgggacttcacctacagggaagttgggtgacctcagtctttcttctttttctctttgcttttaacgcccttggtgattcccccccccttttttttaaacatagacttgtcacactgtgaggacctccatccttgctctcggatagaattccacaacatctttagcttctctaaagagccacttcccggaattctctcaattgtgtctgtgtctctttcccagactgggttctaaatttgggatcttatatcctcactcttggacccccctcaagacctacctctgggtctggtacatagttcacttccaacccctatgatattagacgggttttttgattgtttgttttttggtttggggaaggaggttgtgggttttttgtttgattgtttgttttacttagaaatgcatagttgaagtaatttagccctttgggagactcagactcccctgtcaaaatctgaaagtgggctttgttcctcataattaatgggctatttttttttgagcatttaagaatttttaactttaaaccctgatggtctctacaaatctttaaacctgcaaagtactcaagtggcgctccttatgtccctcggtgagtccaggaaggaaataagttgctcaaagtctaaaaacaattgcctggctccacgcctccccagtttctgagggaacctgggcagcctgccaaccctctggaaacttcacactgcacggagcaggctgctgacagtgcctagaagtctccagaaagaaataggcagccctgagttcataaggcgtttgcgttttccgatgatgggagcctgcagccaaaccctaaagagtctgggccgtggagccgtcctgaaggtcattctcacaggttggacctggacagtgccctgcattctctggagaggggagaacaccacagcaaagcccccttgaccgaggactggtcctcaccttcccaccttacaagagcagaagacagtgttcctcttatatccgctcccagtagcaaaggcctttgctggggaaggatgctcacaaagatttcactaagattagtctaggagtaaatccaggagctttggagtaaacccgcagttctcaacctgcatggggaggtcgctccaccctttcataggggtcacctaagaccatcgggaaacattttgcaatccatagcagtagcaaaatgacagttctgaagtagcaacaaactattgctaagtattggtggtatacgcctttaatcccagcacttgggaaacagaggcaggcaggatatatgagtcttaggccaacctggtccaggacagccagggctaaaatgagaaaccctgtcttaaaaaaacaaaacaaaaaacaaacaacaaaacaaataaataaaaataaaacaaaaaaggaagaaagaataacattttgtttaagcagtatatctaaaatactatattacatttttaatatgtagtcaacatttagggggttattttcctggcgattgaactccagacgtgatgcagatgttttaccactgagctatgcccatagccctgtattcatcagagaaataaaacaacacacacatacaccccacccctgctcaaattttaatcaatttaaaataaatgaaataaaattcaggccttcagtcacatagaccactgatcagtactccaaagctgcgtgtcagctctaagcctctgagggggagaactggagggtactgagctgtgggtgtgggggcgggcatgaacagatagagggaagaggctaggcttcctctacgtgttccgagctaaaggaaagcaccagcagccgcccacaaactctttagcccccccgagactcatctaaaaccatcccacaaacctttacagatgttccaacttcttgtggacaactgtgcctacatcaggacctcaaggccaggctaggcttagagtcctggggcctctcagggctgctgagccaagagcaacagtacctgccatgcctctcactccatccctgtgagtgagagccatgcccacatctgctcccggacccttccctccacagctcttcagccatttcttatattgactagggatgcctgccagccctctggcagaggcagagaagtctagtggcagccttaagagccatctgtcttctctgggaatcttgggcattatctagataatgggcacataccattggcccatcaatattgcacattctaagggtccaaccagagcaggccatctaatggcttggggcagggcccttctggcttgggtctgagtgtgttctgggagaggacatgctgaatttgggggaaggaaatgcctactggaagctcacagtgcttctcaaagcacacagaaactttcatcttaatgcctaaaagcagcgcatcatctcagccttgttatttaggattcgcttcctccccgtggctctcttcaaccagcgctggagagcgtaaattgagatggatggtagactgaatcgcttataaccactattggcttttagctaattattatattttttcatatcggatttttgctccaattgttttttattttatttgtattcatttaagaaagggtctgatcctaaacccttggttgtctaggaactcatatataaactaggctggcctgcctctccctcccaagtgctgggattaaagatgtgccccatcacacccagcctaagatttagtcttaggacatataaggttaagcacttttaggacccttgtacataacaagtttattttctaggaaaaataagaatagatggatggatagatagatatataaatatatcttatgtgtagtgtatgttgtaggatataagaagatgtgtactgtgtgtgtgtgtgtgtgtgtgtgtgtgtgtgtcttatacttggcccagggtaccacttcagttttctgtatttatttattttatattgtgtttgtgagcgtttggccggcatgcatgtacatgtaccacacacatgcctagtgtccaccgaaggccaggagagggctttgggtgccctaaaactggagttacaggtagttgtgagccatgtggtgggttctggaaaaccaaatctgggtcctccgcaagagcaacaagtgcttttaaccactgagccatccctccagtccctccccggtaatacttaaatagctgctgctatgtaggagcagacataacatgtagctcagtggtaaagccccctccccctggtatcacataggagacactgagttaaatcctggggaccccccagccccctaaagtgcctgtctaaactttgaattctgtaaagatctatttgatgctttatcggttctcagaacgctgtaacttcccttcctcggtggagagaagcagctggctgtggccatcagcagcctttgacagcatgccttcctaattctgctgctcaattgtagctggtacctgtgacctcagcagagatctctagtatccgttcatgcacgttcagggactactcctgccagtggtccaattaagattgctcaaccttttcagtctctttggggccatcccagtcaggtggaaatgcctgcctcacggtgcctgcttccaccggggcatgctttccccacaggggattggccatgtcttctgaaagtgaggctggcttctctcacggacccctcaggagactgtagtaagtctcatcctatacggatgagtgttatatagtgaggagagtgatggctgagctggagaacaactcctattttacgtgcatcagtgtcttgcctaaatgtatgtgtgtttgagggtgtcagattccctggaactggagttggagacagttgtgagctgccatgtgagtgctgggaattgaacccaggtcctctagaagagcaaccagtgttcttaaccactgagccagctctctagtcccgtggagagcagctcttcttaggatttatactcagggtttggggggcgggggaagaattaaggagagaatccctctgggtttattaaaccattaaagataatttatttgtctacagtcttctatggatcaaaagcaaatgctgaaggggttacattgagaaacagatggtcctaagagctgtctgatgacttcagaaactgtgtccagttcagaaacaggctttcaggatagacctggttgtttgtttgtttgtttgtttgttgtttttctcttttctagatgcagcgtgtgtgtgtgtgtgtgtgtgtgtgagccatcactgggagagaaactggaagatgaaaccttgtctctctcatttctcagtgtcactaaatgcgttttattttgagattcctgaaggttcttggcaaagataaacaaaatcttccatcaggaaacctgtgagctatttccacaggaagttttaaatcaccaaagtaaatagagactctgcacgtgacttcagcggtgtgactgaggtccctgggtgccaaccgccaggatgagggcgctgggatggagaggggctctggccagtaaggactggctgtgaaaagcagcctgtgtacagccaaccctccattcccatctcctctatgtggatggcgatagcaaattcgttagtctcacctggaagatgtccagaatgtaccaagatgccaaaggacacctcactgcttcagacacctcactgctaggttagccccagcgagcagtgtgctgcaaagcacactgccatgtctgcactcacacgggctcctttttattttctgagagccgtctctgctctcctccttgctccccatgcgccacgcttcatacgccataaaccccctgcttccaggtttcccatgaatactttggcatttcttcagacgatacactttataatggggccaaagccagagaaatcagaaaaacaagcaaagtgagatctagggaagcgctgatacgatgtctaattttggactattgtcccctttaaggtttaaaggtctctttatagctttgtgtacggaggataataataacaacagacaacagcgcttttcatcttcaaagctctttgtaaagtgttggcccaaattctttgctcaaatatagatacatcaccagtagcaagccatgggaaggcattgagaagaagtcagctcaccaccagtagctgtgatttgtaaagccctccagtgaatgttccagaatgacaatgaggggcttgtagccttaaactcaagggatggtgctggaagaactactgaaagtggggtgcacagcctgacctggaatgaggggtcgcttaggagatgtaaagaaaggatggggactgaccccaaacagaatggcttttggcaacaccatcaccttcaaagctatttattattttttgagaatatctcaagtagcccaggacctcttcaaacgtcctaaagatgaccttgaactcttgatccccctacctccaacccccaagtgcttagattacaaatgtgctccaccactcctcatttctcaaaacagtttgtttctctttagattttccctcctttatagtgctgggcatcgaactcaggagcttatgcacgctagacaaagtctctgccactgagctacggtcccagccctaagtctaacttttataacctttgaccatttttggaatctggaaacaggtccaggtttacctccatttttcagaagaaatcctttttttctttttttttttttttttggttttctgagacagggtttttctgtgcagccctggctgtcctggaactcactctgtagaccaggctggcctcgaacgcagaaatccacctgtctctgcctcacaagtgctggaattaaaggcgtgcaccatgcccagctcatcttttttttttccttttgtgtatgtgtatcaccatcccaactagaggagtctgagtaggtgaataacccaaatgtggtgtggcccgctggagctctgttctcaagcaatagggaggaggccatgtgaagcaagggagaatcggctctgaccagctttcccaagctcacccctaaagaactgtttggaaattgcttgccagggcgaggactgtacgtgttaaatgaggaacaaggttctttttttttttcctttttaaagatttatttatttatttatttattatatgtaagtacactgtagctgtcttcagatgcaccagaagagggcatcagatctcattacggggggttgtgagccaccatgtggttgctgggatttgaactccggacctttggaagagcagtcaggtgctcttacccactgagccatctcaccagccccaaggaacaaggttcttatcccaagtcaggaaagccagttcatcatgaagagcaactgggggcaaatgagaaaaagttaccttccccaaacctgccctggttttgtatttcctgtgtcactagggatgggctcaactccacaggctcttcgtgctctgtctgagcacttcccctaacacaaaaagacaggacacttgtcccagcgatgctcctgctgagagaatccaaatgtgaatacaaagtttgtaccatgtctgagtatctcattgtgagacactggtctgaagttcttcattgttcttttctagatgtgccgaatggctttcacgtttccttggaaaagatgccagccgaaggagaggacctgaaactgtcctgtgtggtcaataaattcctgtacagagacattacctggattctgctacggacagttaacaacagaaccatgcaccatagtatcagcaagcaaaaaatggccaccactcaagattactccatcactctgaaccttgtcatcaagaacgtgtctctagaagactcgggcacctatgcgtgcagagccaggaacatatacacaggggaagacatccttcggaagacagaagttctcgttagaggtgagcactgcggcaaaaaggccattttctctcggatctccaaatttaaaagcaggaggaatgattgtaccacacaaagtcatgtcaaacattaaaggactcatttgaaaagtaacagttgtctcttatcatctcagtttattgttactgttgctaactttcaggcccagaggaaacgctcctcccaaaatgagtttggacatgataacgtaataagaaagcccagtgccctctggcccggggtgcccgctggcccgggggtgctctgtgggccgcccggtgtgtgtttggatttgaagatccctgtactctgtttcttttgtgtgtctgctcttctgtcttctgcttcatagcagcaacctgggacgcatcttttcttccactctgatgccaacctcttttgatatatatatatattttaagttgtgaagctgaacaaactgaataatttaagcaaatgctggtttctgccaaagacggacatgaataagttaattttttttccagcacaggatgcgtacagttgaatttgaatctgtgtcgggtgtctacctggttttattttttactatttcattttttgctcttgatttgtaaatagttcctggataacaagttataatgcttatttatttgaaacttggttgttttgttgttttttttttcttttcatgaagtatattgatcttaaactggagggttctaagatgggtcccaggggctcaagatgttgatgtcattccgagagtaaagctatgtcccaatgtgaattatgaaggtccagcaggtctgctccaccctcctctgtccacccaggtaattacacgtgtgtttcctgctgtgattagatgctgttcctcattgtccttggctggactgacagcccctgactgcaggcaaaagtgcagcaagccttcattataaacactcatggcccctgggcactgttttaaagcccttcaccaagctttgatggcattcaaagatgtccacaacccatgtatccaggatataaaggctattgtgagtggagatttaatgcaatcttcttaatgtctattgaaaaatctacccatgagagaaagaaaagtccaccttctctatatgcaaatgttttatggggattaagaaattgcaaaagctaagaaattacaaaaaaaaaaaaagaacagcattaaaactatttaagtgcatgcctttttaaataaaaataaatcaagagcaattacactttgaacttgcatttgaaggaaaggtacttttaatatgcattgttttttctgtttccatgtatggtttccatgtctgattgatctttgtatgtgaactacatggctgggggaagccagcaataatgaccaaaatagtggggcttgagaagcacatggctgggcagttctgtgttgtggcggtggcagcatggcagccctcgagcctgggaactcaccagcctggtttcttcttcctttaggctaacagactgtgtcccagggctaagcttgtctttcacgtgggaattgctggaattgctctcgtggagtgtgaaaagagtaaacaatagcatttccccccaagtgcccgttttacggagccccaaatgctgtgagaacaatcagcagcctggaagttgtcagcccagaggaaagactaatcaatggtatcacgaagcctcacctatggctctttggcctctttgttcattctgaggcaatgtcttcctccagggaaacaatacctcagcaccggtaggaactttcaggggcctcagtttgtaagaaagctggttttgtttttttaagaaaagaaaaaaagagagagagagagagagagagaaatgaaggatttagggagcctcctcagaacaaaacctgaactgaactgagcatgcaaagtccattccttccctgtgagtaggggaaggtgtgcatcccaagagacaattttaagaattccattcattgttgtataatcagtccttccagaatattcaagaaagaaagaaagaaagaaagaaagaaagaaagaaagaaagaaagaaagagaaagaaagaattctatagattcttttttaaaaaaaatccttctttggggtatgaagtgagatgagggagagaaggaaagaaagtgagagagaattggggtaatgaggctggctcctcagctcctcccaaagtggaaaaaaacaaaaacacacacacccctacccccccaccccccaccccccaccccccacatcccacatcattagagacctggaaaccaggccagcaaccctggggtcatacctaaaagagccccttgtgggtggctgtctttagctactcatgaccagcaaaaatattctgtcaattctaatcatccttgtaggggggtcagccgtgctgtgttaactgtgggtttctatcctgccaactatgtatggatgccctgtactctgttgctccttaaaatgtcaaactacattgttacaaagtaggtctacttaacaaagtatgattcttaggttgagcactcttgtaggcaggagccgaaagacgagacacttagcatatagaaaatattttctcatgaataaatcctaatactgtatgctttagagggtgtgtgtgtgtgtgtgtgtgtgtgtgtgtgtgaaccttgtttttaaatcaggagttctgtgtgtttattttgtggctttatatgctgcttgtgtgaagtttgtgtcctacaactagccccttttgggtgttctttgcaagatttgggttaaagctaaccatcctcttataaatagatctgtcagggaaactcaaaacccgtttgtacagatgatattataaactgtagctatgacaataattcgtgttttataggccctgtatccaaaagtcatttaaggcctatgagtagtggtgatacattgttctgtcagagttgacacactggtaacagtagaatgtgctaaagggagctagaaatgcagtgcactgggtctgagttttaagtagaatctgtgagttgtctgggcactgttgaatgctaattagccatgtgttctttcttatcttgtcctatctcactgatgtttttgtaaagatgtcaacattgtaatgagcatgcatgcacaagtcattatagattgaaaagttttctgcgggctgtgatttcaattaagaaaagctgtttgacagatcgcgtctaacgcggacagagggagacactgtaagaggcaacagtaagagtattctcctgcagcctaccctagaagaaggtatttaaccaaccagcacttccttcaacgcgtgccttcagacgccattccataataaaacaagaagactaatgataagctatgagaaccaaagcccttgagaggtctcctaaccaatagtaaccctgctgagtgatgataattcttcttaacttgggatgtcaaaatggccttaacaaatgctgatcctgagagttttcctgcaggaatttaaagagagagagagagagagagagagagagagagaggtgtggggccccgccgcagactcctgcaggggacatggaatccgggccacagcatcacttgtagggtaaccattcctaagctgccctctccccttgttaatgtcctaagatgaggaaccaaatctgttcagagaaagctcagacaagggtgcagaatatgtaagggataccaagaccctctggatttctgccctaggatttgcaaatgagatgggggaaaggcagactagggaggggtgcaggggagaggccttaggcaattctgtttttctcccttgggcttgaggccacctcactagaatgtatacacgtcagcaggactgaataactactccattaaactgagacactgtactcacgggggccctggagggtactgccgttcctgtgtggtatttttaatattataatgtattgcatcttaatgtattaaattcattttttgttgtactatattggttggcattttattaaaataaattgtattgtaccatatttgtatgttttaagagaaaataatataaaatacaatacttgtgctattatatagcgcaaaacctacaaatttgtgcctctgcctcttgaatgaactttttcgttgcttgtatttgggggagagggaggggagggaggggagtgaccaataaagcattgaatgatttcagaattttcctgtttggtctgctgcctcgaagtgtagactatggagtaacacaacccagtccatgaaattcatttcaaacacaggagccatcagccgtcgggctcagtccagagaacaaacataagatgtaagatgatattggcccatcacgcatgtgcaataggaatgttaaaacaaaacaaaacaaaacaaaaaacccaaccccaaaacctctacacacacaaccatgtgtttcatgtttagctctagaaaaatatgaaatatttgcgttttagtaatgcttttctttattaaagaagaaagtgagttggtgtattagtatctaaaaatatagagtccaacctagttctttatttacctacattgtagcacattacaatttgttatcacgttttcttaagggaagccgtagctttaatcagtgaaaagaaaaatcgacaaatgcatgttgaagccttaccttgggcttgtctctattaagatgtccatctgattgtgcaatataaataaccacaccccctctctttcctcgctagattcggaagcgccacacctgcttcaaaacctcagtgactacgaggtctccatcagtggctctacgaccttagactgtcaagctagaggtgtccccgcgcctcagatcacttggttcaaaaacaaccacaaaatacaacaagaaccgggtaagagagtcttctcccttgcttcatcccacttccccattccccgccccttgatcctcccccttcgccattccccgccccttgatcctcccccttcgccattccccgccccttgaccctccccgcttcactactccccacccccatcccatcctcctgcctcaccactcccctcctctccggtgcttgctcttacctgctatccgacagacatctagaaccttccacttaccatgctcgcagaccacactcacttcagctttcaagaaggagtcactctagaaagggtccttacaactgtgtcccgagtgccttcaacagctcagtgagaaagaaatggaaagaccacccaggaagtggcaccattcacctttcaactgggagagggaggaaagacagtatcggcctgagcgatttcatagggtttttttttgttactttttaaactttgtgagtttgagtgtttcttctgcctgtgcatgcatgcttaccacttgagtgcccggtatcctaggagacgggaagagggtgtcagatcccctgacagctgtgagccaccatgaagatgctagcagttgaacctgctatcctctggaagagcagcctgtgctcttgataatcactggtctctctctccaaccacatagtgtatagttttaaacatctagtatatacaaagcccaggaaagtagatttataatttttaaagttcatctacattcattttaataatttggggggccactattttattatactgatcaggcaaaacattttctttgttttagatgcgtgagtgtgtgtgtgtgtgtgtgtgtgtgtgtgtgtgtgtgtgtacaggtgccagtggaggcctgaagagggtgttagctctcctggagctgaagttgcaggtggttgcgagcttcctggtgtggatgctgggaactgaactcgggtcctcttgaagagcagcaagtacccttcaccactaagacatctctccagccctaaaagaagcaaacacaaagaaaaacacacaaacaagaaaaccaactttctaacttaaactaactggtatgagttatagtctttcaaaaataaaaccaactagactaaaaccaaagaatataaacaatgtctcctgcctgcttcgtgtggtggctaaataggatgaagcttactggcttttttggttaacaattacatttgtaggaaagcataaaattgccccttgactatcatgtccaagggcctgcttcaatgcccgtattataaatagattgccatttatctgaaatgtttggcaacgtgatagtgcagggtagccttgaaattgagtcttccactcagaacacctgtgtgagtccaaccttggaatgagaccgtggcagagtcaagcttgacagtagtgacaatatcccagagaggggttacattccacagcacagggccagcatgtcacagcttctcttgagttagcacattcgtcacaagaatgcagcacactggaactggcttcttgtcatccctccaaaagggcctcccactcacccaaaggaggcagcctgcccctgcgtcctttttttttcccttatgaaggttttggcttctctcttactgaggttatataaaggggtaattacttggtgtggggtggtgtgtgtgtgtgtgtgtgtgtgtgtgtgtgtgtgtgtgtgatataaacctattctattctcacactgtattattatttttaaaggtctatttctaatcctgtgtgtagatatgtaggcatgtgcccatgcgtgcaggtgcctgagaaggccagaggcatcaggttcctctggagctggagttacaggcggtgtcagccgctgccgtgggtgctgggaaccgaactcagatcctcttcgagagcatcccatgctcttagccgctgagccgtgtcttcacctccctgtattctgttttaatcatcagttgatatgcagttccctttggcggacagatagcctcattagtgtcttcctactgcttgacactcggtccggtgtacagggagtgataactgaacggcttttggagactgtacactatctttagtaagcgcatcctgtaacacagatacctggcttgaggtgggctctgtatcatagagttatcagttactgaagagatcgtggaatattcttaggccaatatggagaatagacaacttgacccaaagagatgaaaggcttacccaaaatgacctactaccaagatgctagtttgtggtaaattaatcccccgaggtattctgccatattaaaaaggtgagtgaccatgtggatacacacgcagctcgttcaaaagttacttctttctcctattaaatcagagtccgtgtcaatataataaagacccagagagtctctatagaagcctggtaacgtgactccaggcttcaactactcaatcatacacaacacgtggtaaagtgattttaaccctgtgttctaatacgcaatcgtacacagcacatattccatgaagcactaacagaaaatggggactggccctttgagagaggagagtccggtctaaattcagttgtcagaccttaaatgtgatcccagcactggggaggtgcaggcacatcaggagttcagtgtcaccgttggctacgtagcgggttccaagccagcttagggtgcatagaccatgtctctaacaaaaagtcccaccaatcctgaaagtctgcggctgttaggatactggagaaaagacacgggataaaaagggggcggggaacggggagtataagcgctgggcaggtccccactgtggagggcctaacactgccctcattttcctgccctccgaggccctgtttacctctgaaactggaatgccactgactgcacaggacatggtgaggtttaaggtgtttcactcccctaagctgcccccggggggccaccatttaataagcaccactgttagcatttcttaagatgaactatgctatacccatcttctctctttaatgtctaaagctactctagctcagccactgagatggctcagtgggtaaagggggcttggcacaaagcccgatgtgtgagtccgatctccaggacccatgtggtagaagcagtggactgatggccacacgtcagaccctactgtaacctctagggaaggaattctggacagcagtcacatacccattaagtttcaaatgcaacctgtggtcatggccacgtgctccatatcctggcccttatgttcagtatcacccacaggggacactaaacgtgctgcctccactgtggctgtttccatttcaagcctgtgagtaaggactactggtaaccgcagtggctggtcctggctctccgggactccatgagtggaaagcctcttcattgtgttacaccaacaaagtcagtctaagtttgactgcctgagtgcacaaaccaggatgcatctctcacagaaagcctgtcaggtcaagaaggacttccaggcccagagaatcataggggtgctggctccttaacaggaaacggtccgctatcattgtgacttgttaactgacaacccctcaacattccaaaaaaaataggagagaggaagcctggcacacaggcgagctcatgccccggtgaccatcaaataaacgcctgttgaaagggctcagggaagctggaacttctgctccctcatttcctcccaggaaaaccctttcggtgggacacaagccattcttgcaaaggaaagcaaagacaagaaagctgggtagtcacttcttgggccaaagggcagcaggcaggaacaacggaagtcttgagtgcgcgagcccaggagagcatgcacacaggcatagaggccacctctgccacatcaatggaacaagaagaaaaaagcccctgcaaccaccgcactgactcctgtatacgtgggttctcccgtcttgcctccctccctgctggatccaagagcatctccactcattgctcgccagcctctctcttggggctcttccttcccaccctgccttccctgttccctgtatggcaaactcactcactgctaacctgcaatccttgtcaccaggcatgtttctcttatattgcaaggctagggcacatcctttcttcctgggtcccattcatgccttgggaaccaccctattattctctagcttcctgagtacttgttttcaaaccttggaaaatgtgaatgagatggtccgacaggaactgcaaattactggcattcagtcgggcagcaagacatcatgcctatttaatgtccatacctgttaccagaggcaggcacttgtatgacacagttcacaagtagactttagcttcacaaacactgctggagtatatttggttggttggtttatttgtttgtttgataacagtttggagaggtctgctaagttatgctgactattttataggttcaaatatgaagaagtagggagaggggacctgggctcaagtcatggtggtgtggacaactaaggttctctggcgtgtccgactaacatggccagatgtgtcgcatctctcacaagatgacaaacaacagttccaaactgccaggttggcatcaagaaacaaagcagtgaacacctttgtatccctatacatgtaacagcctctagagactttaatttaaagcatagtttaaaaatattttaaagcatattaaaatacataaaacatttttaaacgctgggcatgatatataaagacagaaattattttgaagctgaatctgcttacactcaaaggtttgtttaagtaaaattagttaattgtttgagacagggtcttactatgtagctcttggttggccaggaacttgccatacagaccagggttgaactaacagtgatcctcctgcctccacctaccatatgctgggatgaacgtgtatgccactatgccagactaatttaatggttttaaagggctagcattaatgccatatcagcttgcctcccatttgttttgcttaataagtgtttctgagctgctatgttttgtccagccctgtgctaggctgtgcagatgtgacaagtatctagatctttattgtcatctgtccccatccctcggagctgaggatcaaactcagctttgcgtttggtactgccactgagctgagtcctggagccctgaactctggatattagaattaaaatcaagtaaatgaagctactatcaaaaaaccttaaaccttatataaccaaaaggccaagtgaagagcgcgtgcatgcgttctcgtgggatgcagctttcccccagcagtaactctcagtgtccaggcctgctctctgtccacgtcagttggccttgaagtgggagaagatggattgataaaacgagtctagaagaaaacaccttgacttaatctcaggtttcagatacatgtaacatgagagatagggaaaggccagttaatgtggctaaaggaaaaggtgggcactctggtgctaccatgcatttgggcagctgcaggaggcaatgagatcacgcatagctcaagccagaaggaagccactgcatgtactcaccattaagacgagtctttctttctttctttcttccttctttccttccttccttccttccttccttccttcctttctttctttctttctttctttctctttcttttcttttttgagacagggtttctctgtgtagccctggctgtcctggaactcactctgtagaccaggctggtctcgaactcagaaatccacctgcctctacctcccaagtgctggaattaaaggcatgcgccaccactgtctagcttaacatgagtctgtttttttaattagatattttctttatatacatttcaaatgctatcctgaaagttccctataccctccctctgccctgctcccctacccacccactcctgcttcttggccctggcattcccctgtactggggcatataaagtttgcaataccaaggggcctctcttcctagtgatggccgactaggccatcttctaagatgagtcttaacagatacatttaacttgacttaaaaattacacagttcccatctatatcagaaacatcacacatccctgttagtacctacctatttatttatttatctatctatatatttatgtatttacttacttagttttggttttttaagacacagtttctctgtgtgtagccctggccatcctggaacttgctctgtagaccggagacctacctgcctctgcctcccaagtgctgggattaaaggcgtgtgtgcgtgtgtgtgtgtgtgtgtgtgtgtgtgtgtgtgtgtgtgcgtgtgccaccacctctgctgccgccatcactaccacttggcagtatctacattttttatgtttctatatctcagttaaatttaatttttaaaatctgtagtatattaagataaaaaaaaccccatcttgcattaccttcagcacactaaggctctgcagggcaacaggccccagtggtgagatgttgggtgatgtcgatgtcgggcgaatataaagaagaaacgagggagggtggcttgaaagaagtgagagacgtgcagagtgtctgactggagctcagcagagaaccttggaagacgggttgtgtgacaagctggcagatgacagaagatgcatttcctcagaagggtggagggaacgagaaagcaggttaaagcccacgtaacacagagaacctgcaataagacaaaggcgtatggagggagcaggccgcagagtaggcgtatggagggagcaggccgcagagctccactctgagggatagctggagaagagttaacttgtgatggtggccgctcagaacacactctggtcctccgagttagacagacagcacggctccggtgtgaaacttcactcctgttgagcctttgcaaattgtgacagtctacacccacattgaaacggtgttgtggagtcaccttgttatccttactccttctgcagaccacatgcccaagggatgaacaacttacatttaatatggtccctcacctcatccgtttgctccactatggtcagaatgtgtttcagacagtgacatggctcagcaggtgccccccaagggcttgtgggggaatgctggccaaacagctcacaacagcactacaggcaaagctgatggggtgacagactgatccactttacactgatgctgacactggcacagacatctcaaaaacaccacagagaaaagggtctcctagcaacgtgctgaggagaaactcctccctctcttgaacagatctcagcaagagggaagctctgatctgagggtgctcagcaaagccagcctggagcagtgatgccacccaaccctgaaagcaaatatctgtgacagcacaacacacttacagtctttgacggttaaaatagtggtattttatccagagcaccccatgtctccagcagaccaaagctggagcaggagagaagccccctaaggcagggattaatctttcttcctcagccaaatcttgatcaccaggactgagtaacctgtccagaaagaacctgtccccattgtatcatgaccccaaagatctataccagaggcaccatagtgggtaccatagtgacaggtgaattgtgaaggcattgagcctttggggggaagcaaggcgagaatgttacagggaaagatgggaaggaagagactgggcccctagaatcagccgttcagcctgagttctccagcagagaaatgtcagccaaatacacagagtgtgaattttaccatctcaaaggatgcagttcagaggcaacagatgcattcacaatataaagcaactatgctgctgtgtacttccaaacttcttcctacctcagtgaaaatctcagagagagagagagagagagagagagagagaggccaggacaaaggaagaggcctaaataaaagagacttaggctcgtggggcggaggtccagtacccagtctaaagatgcccggtgatgcccagtaggggctcagggcataaggaactcctaccccaaccgaccaaacccttacactgaagactgggtacttagaaacgaagctcctacatgaccttaggtgtactctgtctattaccagtgtcattgggtgggggttttctagtccatatgtccagagttttcatggaaatccctattcctcccaaatgcaaaggtaaaagacctgagttggcacacacacatcagccatgacactgcattcaccactgtgcccagttaaggccagaggtaaaccaagatgctcttgggtaacctgcttagtgagctcctgtccagcttagttgctgctaacacagtcagctcaagcaagtttggtgcccctccattccagcaatcatgaacttgtctcatgtagttggacgaggtcattgagcagctgaccttcaccaaaatgctttctggatcagggcttcttacattttattgtacacagccacatggacatgagtgtaagcaatagacagacaggccaagcatttactgagaacaaatcagaaggaaattcatttaaacggactggagaggtggctcagaggttaaaagcactggccgttcttccagaggtcctgagttcaattcccagcaaccacatggtggctcacaaccacctatggtgagatctggtgccctcttctggcctatagatatacatgtaggcaaaatgctgtataaacaaacaaacaaatcttttttaaaagttcatttaaaaacaggtctttggtatacatatcaccttgtcattcattaaagacaagagcaaattgcattgtaatgaattagtaaaatatctgggaataagatgttgagtttacactttagtgaaaataaaaattatagacaataagtttaacaaagcatagagcataaaatcaaataactgctatcaagaaaaagcaagcaaaacatgatggtataggcctttaatcccagcactcaggaaacagaggcaggcagatttctgagttcgaggccagcctggtctatagagtgagttccagggcagtcaggactacacagagaagccctgtctctgacaataaacaaccaaaaaacaaaacaaaacaaagaaaaagaaagaaaaacaaataagtaaacagagcaatgagttatgctaagtgcctggtagtgacattgtaagggaaggctggtgtctgagctcaaatctcacagtgcagtatatatattatttgagaggacttacggaggtcaatccatatccatgcacactgccctacctcctctgttttagcagccatgtgcgcagtatggtatgaactcccataattgatttgttggtcctcagttgacagaaactgatcgcagtttcttaactgtagcatctatacagcgcaatagtatttccctgttttaaaataggaactagaagaatcactgtaggtagagaggatgtctgtggtagaactgtaaccttccaggcaggctatggcaactgtgaacatgagcatttactggccaggagtttctacatgcgcttataaagtacagatatgtgttcagctcccaacactgacatggtggctcacaaatattccaggggatctgatgccctcttctggtctccatggaacctgcacttatgtgaacatgcacacacacacacacacacaccacacaccacacacacaattaaacaataaacagtcttaaaaataaagaaaagaactctaataatgaagataagcttagctaaactcgactgcatagcccctatatgaagtatagagatggtcccggggacaagagagcagccactgtttagactgacaaaccagttagaaaagcagaggcgtttgtgtgggaggagcagaaagtataaacacagtgtgcatttatttaaccagacatgcgaatcaaaaactctacaggtttagtgggtcgtattaaaatactgtccttttactaagacaatatagtcctcatcatacacaaaacgctgtgattgttaccttaaggcataaatggaaaaatgaataatttgcaaagtcccttggaaataccaaatactagaataggtggacacatttaaaatgtagactgcaccccgcggataaatgcaggtcgcttgattacaagctgattgaccgtcaaccaactcagcaggtcccgcggatctgacgctgagtatcgtcgttatagccttcagggttcaggacagattcccacaaaaacagcctatggtgaagcttcacttgtcaccttggggctaccagcacctacacagtcccctgaattatttctttgctgcaggaacctgggcatgtttgaactttaggatgataaaactgagtcgtataaacattctagattcggagaactgggcatgcgcatgtggtgcgctacctcattacagagtccgaaccggcggtaaccttatcttcataagataaggctcacaagaaccacaaagccgcccctcctctacaaagcactcctttgcccagggtctttgtgaattttgtcgttccccagttgctggaggccagctggctatttggcacagcgctagacactggagactcagaaagtttaggcagagttactgttctccaggagcctacactggagcaggtgaaaaaaaaaaaaaaagtccactatacgactgcaaaaaccaacacacaacagagtggggcaggcatgggcaactgcagtaacacagcaggggttgagagagcaacatgagatgtttgcaaatgtggctgctccaggaactaactattcaacaaaacaacaaaacaaaacaaaacaaaacaaaacaaaacaaaacacccaagtaagcattagtcaagcaaacagcttgtgggaaacccttgcagtttgtcaagaactgcaaaaagatccaagactcaagaaggccaggggtccttttacgggagataacagagcctgaagctggaacacagacagggccaggtcatgcaggttcttgattaactagaatctaaagcttacccatgggtagtatcctcacagagctatgtctgatctgtgcagcatatggccctcacagtaaatgtactaagaggacatgtttgcaaacattaaaaaggggggtggggtacatgcgagtttgaacattaaaaaaaagaaattcagatttcaattttctttaaaatttaaaaagacaatcctagaatcacatccccagggcccatgggtgtgcactgtaggtaactcctgctctgttccctatttgtccaacctgatgcaggagcttatagtaaagagaaatctaggccggctacatggctaagctggtaaagtagcttgccaccaagcctaacaacctgagttcaattcctgaggcctctatggtagaggagagaagtaagtttgtcctgtgaccgcagcatgtgagacactactgccttgggtaaataagtgagggtaaataagtgagggaaaataagtcaaataatagaaaagagaagtaaataatactgagtattattattaacgcatccctcctgtgtgtagggatgggtgagtgtgtgttcagtgggtgaaaatacaatctattggttgtctgaaataaataagcaagtgcatgaaaggacttgagccatcctcctggtggtaatgaccacatcaacagaaagcgcagtcgcctgttatcttagttagggtctccattgctgtgaagagacaccacaaccaaagcaacttttataaaggacaacatttaattggggctggcttacagtttcagaggttcagtccgttatcatcatggcgggaagcatggcagcctgcaggcagacatggtgctggaggagctgagagttctacatcttgaccctcaggcagcagaaggagacttctataccacactgggtgtagcttgagcataggagacctcaaagcccacctccacagtgacacacttcctccaacaaggccacacctactctaacaaggccacacctcctaatagtgccattccctgtgatccaagcattcaaacacatgagtctgttggggccaaacctattcaaaccaccacatctattcataagtgagtctgttgctgcttctaatactcatgtccataggagaaagaaaattcagcaaacccctcagagaacctaatatgaatgtgcatgacagacagctggggccagggaaatggctcatggcttaggagcactggtggctcttgcagagcacctgggctctattcccaatacccacacggcagctcacagttgtctgtaactctagtttccgggcatttgatgccctcttctagcctctagctgtatacatgtaatgtatagagcatacatgcaggcaaaatacacataaacacaaaataaaataaaaatctctgtgtagctagaaataaatttaactttaaaagcaagttcttgggctggagagctggctcagtggttaagagcactgactgctcttccacaggttctgagttcaattcccagcaaccacatggtggcttacaaccatctgtaatgggatctgatgccctcttctggtgtgtctgaagacagctacagtgtactcacatacataaaataaataattctttttttttaaacttagcaagttacttaaaaagaaaacaacattcaatgacataaaagaacacacacactaaaaagaaagatccatacacatgaaataaaaataaatcaaaacaagtcagaaacagaaccataaatatatagaaacttgcaatctcagaactggtaccataattcagaggggaaagaatattttattcaataattaacactcaggtgagcatggccacacatgcctttaatctccgtactcaggaggcagaggcaggtgtattgtagcggtgaattagctaaattgctttggttcttggtgggtcccccctgcacctacccaagagctctctggattcgagagtgaaagacacagacacacacacacacacagacacacaccagctaattttgatatgctttgactgctagctcagcggttgggcacttctaaacctcccagcggctagcacacactttcctcccatgtttctggcataacacctagatctatattttatccttgctgccctgttactttctgggcagtttccccatagggccacattccctttctacctacgatgtaggacactttctctcctgcagcccttaaatctcatccctatgcctctgagtcaaggcaattctcctctctcccgtggtcccttgcctacgcaatctgaaagtcctgccctgtctctctgcccagccactggctggatggcaattctttatgatcgattgaagccagctggggtcaggaaccctcaggcctggaagcgcggcttttgggagccgcaataagacaacaaagcactagattccattctcaacagtggatttctttgagtatgaggccagcctggtctacaaagtgagttccaggacaagggctacatagtaagaccctgttccctccccctcaaataaataaataaataataaaataacaccacagcgcttagctgtctatgtggtaaagatcatccccccaccaccaccaccaccaccacacacctttctccaaaggaaaactcaaagacagaaaaccaaataaggaaaaagctcgcagtcatcaaaccttccgccgggacttcattcgttcgtatttattttccctgttcctgatgcaaagcaggtgctcctcttattttacagagagaaaaacatcctcagagtgactcgaggactcgggcagtgaaggcacatttcctttcatggagactgaaggtgtccccttgggctcttctccctccattgttgcttgagccaatccctgcacatatgtcttcccagtgtgtatttccatttcttctccccctagcttcctatcctcccatccaggctgggggtggggggaagtgtgggtctcaccattccttgcctgactttccagtagggagccggactgccccatgctgttctttcctcattccagccccatcctgccttctgtgagactaaacttccctgcatgccattggcatgatgtcatttccacagtcagacgttttcaggactctcttcctccaagctctgatcagaactacccctgacttcagagttccccttcatctgccagtcattcaaaaaacagggcttttggaagcagggatcaaacacatacacacatacatacacactcgcgggtgcacatgcacacacacatacacacacatgcacacacacaagcacacatacacaagcacacatacacatgcacacatgcacatacaatgcacacacaatacacatacacaggcacacatacacacccacacacatgcacacacaggaaagaatggtaagagggtgcacattaagctgcagtcatttcacagcagtgggataattttggtttgtgtgtcttgttttacatgataatgctcaaccctggtgagaaagatgaaatcgtgtatcattgttcacttccggtacaacatgaatcgattgtcctagtttacatctccgctgatgtgagaaaacactgaccaaaaccaagtggggaggagagaatttatgtggctcacaggtcattgtctggcattgagggacgccaaggcagggactgaagcagagactagggacggatgttgcttactggcttgttcagcctgcctccttagacaagtcagggccacgtcaatcattaatcgagaaaatgacaatgactataccagttgacatgccaatgtggatgggaacaatctcaggaggccccaccttccagccccacccccagtgaagagttacaggcaatgaaccacactccttggagagacagagttggccttcctcagagatgagcaatctaattgattatctattgccaattggtcagccctaaaaacatatatatggatatactcagcaggttgtattgacatatttgttcacttatatatgtatttgtgtatttgtgtatgtgtaacaataataattaaacaaataagatatgaggttgagatggagcaaagtaaagtagggagatatgacagggttatatatttccagcagttgggaggttgaggtaaaaggttggtgaattccaggacagccttggctacatagcaaaagcccgtctctggtgaaaaggaagaaaggaagaaaacagaaacaggctgccagctccctcccaggtcaccttgaccttggaaccctactcttcttacttcttgggaagttctggatttaggaacgacaccctctgtctctcccgccctcttccctccctctctcccaaattacttctaccagcacataaaaatgctataaagctttgcatcgtaagaaggaaatcctgggctagagagatggctcaatagttaagaataggaactgcttttccagaggaccagagtttgattcccaggacccacactagtcagctgtgtccctagttccaaaggatctgatgtctctggcctccatgggcatctgtactcatgtgcaaccacacacacacacacacacttaaaaacagaaaaaataaaattgttttttaaagttcccttcttgtgctgaagagatgccttattgcttaagagctctggctgctctcgcagagaacccagattaaggttccagcatccacatagcagctcacaaccatctacatctgcagttccaggggagtccaacacctgcttctggcctctatgtgcaccgcatatacatggtgcacatacatacatgcaggcaacatgctcacgcacataaaatgaaaataagtaaaatcttaaaactctcctctccagccacgttgctctgtaggctcttgcacggaaggaaactcctcactgccccattgggcaccgccctgtctgtttccgtgtccttgtcaggttttcctccattaaagtaggcggttagcttccttcctcagtgctgtgtgctctctcctgtgaaaatgtcttttgtcgcttccaggagcctcccggttttcttgtcacctcttgtgctctctctcttttttttttttcttcttccacttggccaatctccacggctcaggctgtggccactcatttgcctttctctggactaactgagcccacaatcttcatctatagcccacggggtttcttcaagtcccgccttctctctgtgccccagatgaatccactctttggatatgcagtagccatcttgaacagaattctcgaccatcaccttcatttggctcccccataatcttcttcatttccagacgctccacatcccagttgtctacaccattggcttagacatcagccttccatcgcccctcccttcatactgcagcccaatctggaagcaagccagttgattcttcagagaaaccccaaagttgatcaccacttgtggcatcagaactctagttcaagcctttcagtagaaaacccccaaaccagccaccctcttttccatgtctacctgctgctgtgccatcttataatgattaatggcttctcccccgcccccactcttcttatgctaccagggagggaccctaggaccttccttgctcattttgggaaagcactctagcaccaagccacatccccagctcatcccacagtggattgttttggtttatgatggttttgttggttggcttggttttgtttctgagacagagccacgaagcacaggttggcctcaagctcactggatagctgaggctaaccttcctgtctccacttagacttgtaagggttacaggggtgtgctaccacactcagctcaccaacagatttacttatcgtccatctacctacctgtctgtctgtctacctatccatccatccatccatccatccatctacttatctatctatctatctatctatctatctatctatctatctatctatctatcatcaacctgtctatctatcatttatctacctgtctgcctatctaaatacatattattttatatgtatgtacgtggacctgagtggacttggaagagggcatgggatctcctggagtgacaggcacttacgagctgcctgatgtgcgtactgtgaattcaacccaggccccctgcaagcacaagtactcttagctgccaggccatctctctaaccctaaattcttacgatgctcgggaaggggtcaggatcggtgtcctggccgcttctttcctctgcttgcttcccaagtactcggtactcggtactcagtactgagctgcagaggtcttgctccttctcgcccccactcttcctcttcttcttcagattgtttcatgtgtatgagtgtctgtctgcttgtatgcacatgtatgacacgcatgcccggtgcccacgaaggtcagaagaaggcattgactcccccttggagctggagtcacagatgattgtgacgtatcatgggagttctgggaacagaacccaggtcctttgcaagaataacatgtgctcttaagcatggagacacctcttcagccccttatttctcacgtgggctctttctcatctgctactcactctgcctgtgatgccatctgccaacccatcagaggcttgtccctccccactctctaggtcccccaattagaagagctgttccatttagactgccctgtctacaacaatcgccctccttagcaccgccttcactcagcttctcaaacaagcctgctctcctcataggcttcactggaaacaagaagggagccctctgtaggcaaggatggcattagtctgccactgtctgtatctaaccctctggcatgtaaatatttttcatctgagcaaacaaattaccttttttaaagtctattttttaaaaaaaaagattaaaggggcaagtggatgctcagtggtcgaatgtttgtataaaatccctgggtttaaatggggtggagcagagagataagtaataaggcaatgtgtagggttggtatttagctcttctaccatctatttatctatggtccatctatctacctgtctgtctgcctatctatccatccatccatctacttatctatctataatctacctatcatttatctacctgtctatctatctacctgtttatctatctatctattgatctattgctctatcatccatctacctgtctacctatcatctatcaatctatcatctattgatctatttgtctataatttacctgtcatccatcacccacccctctgtgtctgtctgtctgtctgtctgtctacctatctgtgtatctatcccatcttcctgttttcgtatgtggtcagggacactgacttcctctccaggacaagccctcagtgtgtgttcactattgcctcttgtctcattccttgctttctcagttcacctctgacagtccctcaagcttcaactcaaggcccacctctgcctctacgtacccctccctaggtgctcactggcattcttgttaactgtctgttccccagactcacactaatgggagaacaaatacctagtgaacacttggtgacagtactcggtagaggcctctgtgtctcaagcttttcaggggtctggaaattcatggcagtctatgtagtactgagtactaagtacttacatctactgagcactcactaccacaatacacgtgcattgaatgggaactgctttcattttatatgaagactagggaaaacaaaacatagatcgagtaagtgatctgcctataagctaaggtgtggcttcaaacagcctgccacactctttaccaccaggctgcacggcctcatcaggccctatgccgcaaccgtgctatgggttaagctacgagttcttaataatggggagtctccattttctctgtgtgatggggacaaggcatcaacttctgagtgtttggaagcatcaagctctggtctggggactgcagggtgcttggctccccgcatgattggacagacgtgctggtcagccctgcggagaatgagcaaaagaccccgtctggggttaaatcgggctcagaaccacttccgggagcctgtgagaggaaggcactaggcttcctgaaggctgtttgggtttgtcctccagacctgctaatgtaaacatctctcgctccccaggaattattttaggaccaggaaacagcacgctgtttattgaaagagtcacagaggaggatgagggtgtctataggtgccgagccaccaaccagaagggggccgtggaaagcgcagcctacctcaccgtgcaaggtaaacagctggtagctcagacacctgtttccctgtttgcttaactccccccaacaccccatccccaaccccctcccacccccacccctgtctctcatctcttgtctccccccctccctaccccctatccccatatccggtctcctatggcagtccagcgggttctttctgtaccctttctccttgcctgatgacactgtgtggttctatcagaaggaagcggttggctgtccttggatgccccaacccagcagtgtcctcaggggaagtacttcccggaagacggagagcctggtgtgccactaacactgtggataaaattactcaggatgacccaagggattcatatctgtgagaaataaggtcaggaagaaagaggggacccacccactgaaattgtccatcgttagctcccctccccctttttctgagtgttggaaattacagatgagatactttttcatctgctggtttttatcacaagatgacacaaattattctcagaagcaatacatacaggacagctcacacctcagacactgtcctgcaagcacctcctcttggccctcagatactttattgaagaacgaagcacaaagtggctggctcccaccctggctgcagccacgtggcttccatttagaaaacagtttcagcccaggtttcggtttttccatgctaagcaccatcccgacacaacgcatatcatcgtaagattgctgggcacctcttaggtaccaatatcaatggcatgtggagatttgacatgaaaagatggagatttgttcaggagccattccacagtgctcaggggtgcatttgagagcatgggaatggttcttgggaaaagccaagaaggaagaaaagctgaaattattctactacaaacctgtacttccaaaaagaggatagtattccccaaacagcctgagggatggtcctatctatctcctaaatcatccttgttttaaaatggtcttccgattctgcccacacattaaataagactaaagaaacttcttgctctgtctttggcatggtcatcaggtatggccactgtagcagctgcatcaggccagggagaggagaaaacaagagatgcccgtcagccttgcttaaaggtcttccagtggacccatgagatgtgtggagcagttaggaagcccccacaggtgcaaagaggtcaccaaaaactcagtcggccaatattggccctgatgaaggaagtttcctttcttctcaccccacctccacccaccccatggctgcttcaccttgctaagtatctgtccctgggctttctagtaggcaacatggtcagcagccgttgcacatctggtggagtgggagaagccctggcatggagtaagaatgtgcaagccagtgtgtgaactgtccctcttctgccaggataatctgggcatctcagaagccatgttacttggccttgtgttttacaacatctgtgaccccagtattcccctgagactgccctctaaagcctcataggttttgggggcatgagtatcagctttgaagaaggatatatcttaaagtttatttatttatttatttatttatttattatgtataagtacaactgtagctgtcttcagacaccccagaagagggcatcagatctcattacatatggttttgagcctccatgtagttgttgggatttgaactcaggacctccagaagagcagtcagtgttcttacctgctgagccatctctccagccccagaaggatatatcttgaattgggaacagtttgcaagttgacagtaaacagagctggggaggcctgcatgtgagtgagggccaggttctccaaggactctcggctcacaaaattaatgtggttgtaatgtgatgccattcagggccgtggactgcagtgatcttcagatcatcttatagttgaaaatggagggctagagagagggctcggtggttaagagcgttggatggtcttccaaagagccagggttcaatccccagcacccacatggtagctcacacctgcctacaacttcagttcttggggatccaatacctgcagacagacatatatgcagacaaagtactaatacacataaaataaaaattaacattgcacatacctttaatcctagcacttgggagacagaggcaagtggatctctgagtttggggctagcctggtctatagagtgagttccaggacagccagggctacacagagaaaccctgtctcaaaaaagaaagaaagaaagaaagaaagaaagaaagaaagaaagaaagaaagaaagagggagagagggagggagggagagagagagagagagagagagagagagagagagagagagaaagaaaggaaggaaggaaggaaggaaggaaggaaggaaggagagagaaagaaagaaagaaagaaagaaagaaagaaagaaagaaagaaagaaagaaagaaggaaaggaagaaagaaagaaaagaaaagaaaggtaagtcagaaaaggaagaaaggaagaagaaagagaaagaaagaaagagagagaaagaaagaaagaaagaaagaaagaaagaaagaaagaaagaaagaaaggtcagaaaaggaagaaaggaaggaagaaatttaaggaagtggacccttgcccttgaacttatgatccctgtcactgagggtctgagcataccctagcttcagatgtgatttcctggtacactcctacctcgcccagtcgaatttaggaaatgtaggcacatgggttgcgtctgtggctatgtttaacagatttaaagaggttcaggaatcagccaggaaggaaacggtctgctcattttattccctttgcaaaaggagacttatacttgctgataaaacaatgtgttattttggtatctgaaaaggataaatggactgtgaagtccgagtggcttctttaaataatcacaggtcttgtttgctttggacgggactttgggcacatgtggagccggggcaggggtgtgaggtggggggtggtggtgttccagtgtcaagaccacattaaagctgtcagcaatcaagatcgtttctgaaattaacatatttggcccacttgtatccaaacacttaaacaaagctgcctctcatcaaggctgaaagctagactccacacaacgactttcctgaagcagacttaggcgtggctgtgcttaaccgtatccacaattattaggacaaacacctcagagactgcctacacctcgaagcttccgctacaggtgatggtggcttaagagatgacacaaaaaggtcacacagtctctacgctggatgtggtgtcccagatgcgggttgcaaacagtggtgcctacctttacatctgctggagaaaggagccacgcagtaaggggcatgcaccacacccccaattagatgccaaggctttagaatgaaaacagctcaaaacaaagcatgtctcaatgctcccctaaccctaaccctaaccctaatcctaaccctgctcccctaaccctaacccaaaccctaaccctaaccctaacccaaacccaaaccctaaccctaaccctaaccctaaccctaacccaaacccaaaccctaaccctaaccctaaccctaaccctaaccctaacccaaaccctaaccctaaccctaacccaaaccctaaccctaaccctaaccctaaccctaaccctaaccctaatccactcccccggagtgctccattccccgggtcctctttgacctgcagtcatcctccttggccccgagcaacttggccctaaactaacttaggacttcctgtttctccttctcttgtagatgctcacaattttcagagtcccaagtaacaaaccatgctcaaaaaaaatggaagtgtactaagggatgttagtctatccctaagtgtactcaggatgttaaaggccctaaatatacatagctttttctttttttaaactttcaactccaaactatggcatagagctgtaataatacagtatttggtctgtccatctttgtaaactttttttgtttggttggttggctggttgtttttttttttttttttttaatgctttaatccgtatagaccaatttggatttaaagaatttttataaggatgcccaagttcagtaaagatgagtaagatatctatagatagttcttgaagccaaataattagacttcaaacatactcatctcatttcttctcatggaaactaggcttacatgaatctatatagagtatcccagacatagatggtagcttagttaggaaggcctgaatatgttaattataccctgtcaaagcacgtggtatagcgtgttaagcaagcatgcatgaatatacttgattcttttatcatttgatgcatgtgagtgctttgtcttcatgtacatgtgtgcattgtgtgcatgcagtgcttgcagaggggaccctggaactgaaatcgcagagggtcgtgagtcaccttgtaggtgctaggacttgagcccaggtcgtctagaagaccagccagtagttttaaccatccagccatctttctattccaaccccgactccctgcttaaatatttgcctcaatcctatgagcaagtttagttgttgaaaataagactctagtaagacctacagaggggtcaaatgacatcacagggatactaggctaggaagtgacagagctgagaatgggaaacgctcgcgtccctctcctgccctgggtcacatagagggcgggggtcctcccggcagcagagtgtctccacctcaggagctgagtcactcttgggagattacctcctttcctagttcttcagtttctgcactacaaaataggaccattcatgatggttgactaaccttcccaggaccgtcacaggatgaagagggtctgtcatgataagatctgaagtgttagctattattagtattattagtattggttagtgtgtttctctactccagggtaacttttagtatcacatagcttcctggccttactgtgagtcacccggatggcgtaccaaaccgcagtattcctgttgggttaaggactggcttgggataagaatgtgttacagaacaaatgtcccaaaccgcaattttaattattttctttcttccttcttttcttccttaacctgaaattactctcaaaaaggtatttcatacatatcacggtcctgaagagaagatccaaactgatctatacagattcttcaaacaaacaaagcctgttacaaaaatggacaggcctattgtactattctagtaagctacattaaaggtcagaggtcaattgaatctcaggtagaagacagcattctgtgtttagcttatgagaatggggtccgatctattctcgtacctgtggatctttttctctggatttggggtagaagcacaaagggagcatgtgtctgctattcatttatttatttattacttcaaattaacaacagagcagagtttaccaggcccctcttatttcgggtcaggtaaagctttgtgagaagactcttcaaagatgccaggcatctgtcccagagactggtttgctttaggcagaaaaggcaagctgatgcttggagtgggcatgacagagaagttataaagcagagcaaaacagagctgaaccagcagcccttgatgcccaaaaagtgataaggggaaaaaataaatgtgaatgtgtgagtgagtgagtgtgtgtgtgtgtgtgtgtgtgtgtgtgtgtgtattttatctacatatatatctgtgtgccatgtgtgtatttggtgcccaaggaggccagaagagggtgtcaggtcccctggaactggagtcacagttgatcctgagctatggtagtggtaattgaacctgggtcctcctcaagagttcaactgtgtgcctgtcgcctcggcactggggggtgccactggagcagcaacaagctactcagaggaggcagaacacagtgcgtgataggggtcccagccgatgttctcctggatgaaaagcagcgagatctgggacagatgctgtggtcctcaatctcctgtgtacccagatgccgctgggaccgaaaggagttgagaactgagacccgcaagtccgtgcttcccctaaatgccagcaggaaggggatggcagagccccagacaaggcatactctggtttggttccaagtgaatgctgagcttcaaatctctttacagatggttgtgagccaccatgtggttgctgggatttgaactcaggatcttcggaagagcagtcagtgctcttaatcactgagccatcaaaaaaaaaaaaaaaaagtgaatgctgaaagtatagagggctaaaagagggagtggcttctccaggagacttaggtgtgccccacccccaccccccacagagatccttgtgggggaaggaagcggtccttgcttgtccaaattgctttattctttcatgaaggatgtaaatgcatacacatcttactcagggtggaccagggattaaataccttttataggaagggatgcccagggaggggagctcatttgctacctcattagcatggaggacttcaggtttttattctatgtggctggttttcaaggtcctctcagtggggtgtcatggttccgtggtccagattaggtagagcctggctgggatctcttccacacctgcggttctcaatgatgaaatttaccaggttgtttgtttgtttgtttgtttgttttttgtttttcgagacagggtttctctgtgtagccctgcctgtcctggaactcactctgtagaccaggctggcctcaaactcagaaatccgcctgcctctgcctcccaaggcgtgcaccaccactgccggctttactggggggttgttgaatcttaccagttcttctgtctggtggcaacggtccacctgcattgagctgtctctccagtccataaaactgtatttaaaaattcaaggaggttgagagaagtggcaggaagtgagggaagattcaaatcatacctgacggcagtttgcatgtaaaaagaaactgaggcttttggtctattacacagctgctcacaggctcatacaagaatgttttcccaatttctgatgacagttactctagttgtgctccccccccccattcttccccaccacaccccaccccaccccaccccaccccaccccacaaccctctctgggcagggtaggttctgaagctaaaactccctggtgattggcttcttgggaactcaccttgttatgttctgtgagctgagctgatggctgtggcgcctgaggcactggcagcctgctaccacacagtgccacatgccaggccagtgtgtggatgcctagctaccgagaaaacacctaaacgtttcttaggctagtcttcccagccaaagcctgtccctggctacagtcctgcaaaggcgtgcggccagttcactgagccagaactgcgcacaaagaacccaccaccattgccaccagacaagctcaagacatggcaccacacagattcttgaccccccaccccctaggaattcagacaacctgctaagtggtacccagagggatgacacgaagcccggggagaggcaactggcaggggaacaggaacctataccaaaaggcgccattataggcttggccacattcttatcagcatcctgagtgaaacagacatgctgggtccttctgcacatgaccctgagcacaacactccctcctaataattgtcaagtcccacccacactgcctctgcccctgagcagctgggctattttgtagactggactgatcacctgccaccagcctgttaaagcctgcggggtaggggtaggggcggcggtacggggggggggggggatgttgcatggggaagtggctagtcaggctagtgtgtatgtagagaaagcacccagggaccaaagcatgtcctgacagctcttttgcaaagagcaatagaaacaaaactatcgagtggaactcagatgccaccgtgtaaaagactaagatttttatttactaagcactactgagtgctgatgttaaattgagcctgacgttcttcttaacggtattctgttgagccggtccctcaaacgtgtgactgcatataaatagtcccacccgaaaggaattttgcttgagtaagggctatggaattagacttcgggggccagtttcctgtcccgtggaatgcactgggaaagttcccacagtcagacagggccacgtgcttcacgttccatgttggattcctgcacaaggaccctacaaggccatcagcatctgtgacagtcaaaggccactgcagcgtacattcagaaggctcctgtcatactacaaaacttattgtagcatgcgtgtacgtgtgtgtgtgtgtgtgtgtgtgtgtgtgtgtgtgtgtacacgctcgagtgggcatagtagaagaaatccatactcccatgaactttggtttacacttttctcactctgggggatctatattgagattaaaggacaaaagaaaatataagacctaagcatttaaaatttcaacttaatttttaaaactgggagtggggctggagaggtgggtttgtgaaggaatttgctctgggtgctctgcagaagaccctgttcagtttccagcacccacgtggtggctcacaaccatctgtaactctagttccaggagctccaaagccctcttctggcgtccagaaacactgcatgcatgtggcacacacatgtacatacacactggcaaaacacccatgcatgcaaaataaaagtaaaccagtatttaaaaaaaattggcaaactagagccttatcgtacaatgtatgaacctccactgagctatacatatttgaattgtatgctgacagtcatggagagcacatgttgtcactgaggcaggggaatgacaggattggatctgtggccctggaaaggagtgaaagtggcctgaggcagtcaaagatgggcagatgagaacggaagcgggttctctaggcagcgacagaggatgaagaggaacgaattccttcacaaaccctgaaaatagcccgggtaggacggtggacattgcctctcctaagtgactggtgaactcccataaaggctcagaagatccgaggaaaggaggaagtggcaggacccttagatgtgtggttgttaaggactcggatcccctgggttaaaatcacagcaccaccgctcacaggccagaggattaatcgtcaacttcatcattcaagaactggggaaagtctacttgacagtgttggcaggagtcttgctgagtgtcagcatggcttctcgtggctttgcagagcacattcttactgtgattccgtgcaggtgacttcactgactccaaatgcctacagcattgctcctgctttgtcccatgctcagagtgccatgatgctccgggccccgccctgtgcttcccatcatactgacaccaaatacaaagacattaaccttactttgtttcttttttttcttttttttttttttttttttttggttttttgttgttgttgttgttgttgttttgtttgtttgttttttgttttttttcaagacagggtttctctgtacagccctggctgtcctggaactcactttgtagaccaggctggcctcgaactcagaaatccgcctgcctctgcctcccaagtgctgggattaaaggcgtgagccaccacgcccggcaccttagtttgtttcttaagatttatttattattatatctaaatatactgtagctgtcttcagatgcaccagaagagggtatcagatctcattacggatggttgtgagccaccatgtggttgctgggatttgaactcaacacctttggaagagcagtcagcgctctcaaccactgagccatcttccagccccgttttttgtttttgttttggggttttgttgttgttttagaacggggtctcccatgtagatatcccatcaccaaggatggctttgacgctcttgcttccacctctcaaggtgattataggcatatgccactacagccagttcatgttgtcctgaggatcaaacccagggcctcgcgtatgctaagcaagcactctaccaacagggctacattcccagcccagaaacaatctttctaaatgcttcccaggtctgcagagatggccgcaaagttggcaaaggctttggccatgcagacctgattgcttgaattttatttcctgggacccatgtgaaaagctgtgatccccgcactcctagggtgagatggacgcagagacaggagactgacccagaagcttctgagccagctagaaagaaatactcagcacagtgaccgaaacaagagggaccttgcctacagaacgagacagaaggaaagaaccaacttccaaaaatgttagcctctgatctccacacctgcgctgtgacacataccccgcccgctccctgcccccaataaataaatactttttaaaatgcttccgaggtggatggattcaatgtcctctggaagaggtatttttaaataagtttgattggcaggcaggaaggcagagaaggacatcatgagagcgggaagggcaaaaggaaagccccagtcatgagagatgcagcacctactgatgccataggaggatttagctcatcctggcgaattacgacagggaatcccccagtgagatacccatgtttgtaactatgatattgctgtcatgtatccttagtgagggcccagtgtgtgtgtgaacacagatcccccgtcatgtgtaagaagaacaagtctcatctggccttggcctaacctcctttgtcattatagttgagtcaagaaggccatgctcaggcccagtgctgtgtgtgtgtatgtgtatgtgagagtgtgtttatatgtttgtgtttgtgtatgcatgtgagtgtgtgggatgtatgtatgtgtgatagagcaactgtgtgtgcatgagagagacagagagacagacagacagagacacagagactgccctgggtatccccccctacagtgctcagcttttgtgctatgagctgtggaatcagcgtgactgggtgagaagcagtgcctctggctgccaaggtcagagccccagaagaagcaggcaggcgatcatgagttttatttttatttttatttccatgtctgctttgaagaattttgtgagtcccaaagcggccccttttatgtcttttcatatttttctttagaatttcctctaaaacccattaggtggacttaacatttcacagatttagcactttaatgagccatccctcccctaatttccttccatctttattttctcttctgatttttaattaattatttcttagaatactggttacaaagtcagcagaatttctggaaagtccttccgggtgcaagttcacagcctgtctcagaagtcatgtgctcccacagatgcccagctagagtgagcagagacctcacattggaggacttcttttatagcatctttgtgatttttctctctctaggaacctcagacaagtcaaacctggagctgatcacgctcacgtgcacatgcgtggctgcgaccctcttttggctccttctaactctcttcatcagaaaactgaagcgggtaagaaaacagaagatatgatcgccaagccacgtgatcccccactgcccctgtgagcccgtccatcgttcaggtctcactggggcagccatcatgttgagtgggagggggggtgtctcactggggcagtcatgttgagtgggggaagtgggggggaggatgttcagcaaaagtgaatgtggtaagaagaggctgctgctctggttaggggaggaggtgaaggggtagtgtgggtgtcctctggaattgaagcctcccctcatagatcagagcaagcaagagttgacccacacacgctcaggaaataaagaggtgcaagaaagaatcatgactgcctacacggttggagctgagagatctaacttgagaaaggcaaggtttctgtgtttcctagagattctcctaaatggttgtcccatgtcctgtgggtaacatcttatgcagggtctcggttcatcctaccaaaatgtcagagagagagagagagagagagagagagagagagagaggtattgatattccccattttaaagagggaaactgaggttccctgaggtaaaggcatgggtccaaatgtcactatggtagtttgaatctgagcacaggcttgtctgacctcagcgatagtcaaaatcatataaggcatgcttgatcattggaatgggagtgatggctggcagccatcttccgtgttcatatgagatatcagtcttctgccaaatggagcgtttggttttgagacctgagcaggccactgctttggaaggaaacaattgtcttgaaagaagagaatacatcttctgggaaaatacttgattaagatgcttgagatagacttgaaagagaataactgtaagggatgagtaaacaaagaaagaaacaagcaaagcacacagtaaccagaccctctcccccccccaactggaacaacagccttcttattcagcaagacctaacgggataagactggaaagatctagaacagatttaagagggcctttaggctaccaagattccgtagcttgttgggtgtgagagatcatctgcatcttgagtggaagaggcaaaggtcagagatgactaagtggtttctctaaccacagtgctaatttctcactgataaagaacctacttacagcagagccagtcttagagcaatggctaaccgtattgatgcttgctagaaaccaggtcctgttctaacaggttggtcaatcatttcatagccagagcgaccctctcagataagtacaattgctattaccatttcacagataagcaagctaggtttagaggcgttaaaaccacttgcctgggaggtcatttggctgtgcacaaggggtggctccgatggaggcagctgtcttccatgccaagtgctgagcagctgcttagagatatcatcaattaaaagaataaatatctgtcaactagtactctgtcggcacacttccctcacaggtccacatggcattccctctctctgccttattgagctaaaacattgagtttctcaggagccacatgggttccactctaaatccttgccacctccccatcctgcataaaggcaaggtgcctctcgctaggtttcagctgtcgtgtgctctttaatggttgccttggcgatgttcaatgtgaaaagctcattagttttccactgagcacccggcacctatagcctgacaccatcggccttgcttcttatctttgacttttcaactttcttggatgctgagcaaattctctgccctgagctatttgtcccacgtcctaatgatactttttgcgaagtgaatgactgcaagcaagtgatggatgaggtgagctgtgaccgcccacaacaggctgagtaagagctgaggaatgtggcggctgtgagatggtgtctacggaagggcttgtccctcactccgtgcctcctcctggttaagggaggagaaggccggcctcattgccatgaacttcatgtaactttgaggcaaggattctgtgggaaaacactcattctttctgtcccatccaagactttgcccacagaaactcagttatcaatgccggagatgtgtccattagcaggaaacgaacctgctgacagatcctaactgtcaatctacttctctgtgatctgccacagtggctgctttctgggtttaatttgccaccacacacagttgtcatatgcacttgacctctgaacaatgccctaaggaactcaaaatgtgtctatgtttatgcctcaggtttttgtttttgttttgatttgttttgaaatgatcagtctctatttctgagactagacaggactttgcataagcttctgttctaatggccctactggactctatggtcttttcggatagtaaaccaattaagagctgcaggtatctgactggttagatgcttaagaaatgtctacatttccctagggaccctggagtaacttggccactcctggctttcttataaattcagaaaaaaacaaaataataaaataatccctcccccacacacaatgcgtatccacattcacagagtggtgctggagagatggctcagtgattaacagcatttatggttcttccagaggacctctgttctgttcccagtacccacattatggctcacaagcatttgtaactccagctccaagggatccaatgtttccataggcaccagccaggtatggtgctcttccgtccatgcaggcagaatgcacatacacaaaaaggaaaaatgctagtctttttacaaaagatgttcagagcagccacagaaagctctcagtcattgtttagaatcgtattaaatgttcttcatctttcttttcttttctcttctttctttcttttttttctccccccccccccatgccggccccacacgctctggccatgctctggccatattcatttcatatatatgagtccactgtcactgtcttcagacacagcagaagacagcatcggatcccattacagatggttgtgagccaccttgtggttgctaggaattgaactcaggacctctggaagatcagtcggtgctcttaaccactgagccatctctccagccctttgtttttctttcaaaagacaagctctcatagggttgcctcagaacacgatatgtatgtgaggccagtgaaggtttggggcacactcattcaagataggatgccattgctctggaaatgcctcgagagaaaagtaaagagctgtcctgcagagacactgtcctattgccatgaagagacaccatgaccaaggcaactattaaaagaaagcatttcactgggggcttgcttacagtgtcagggggtgagtccatgaccatcatggcagggagcacggtgtggcagtggagcagtagctgagagcaaaataacaggcagagaggagactgggcttggcctgggttttcaaaacctcaaagccccacccccaggacacacctcctactgcaaagctacattaaagatttactcattttatttatatgagtccaatgtcgctgtctccagacacaccagaagagagcatcagatcccattacatatggttgtgagccaccatgtggttgctgggaattgaactcaggacctctggaagagtagtcagtgctcttaaccactgagctacatttcttaatccttcctaaacagccaccacagtgtgtgtgtgtgtgtgtgtgtgtgtgtgtgtgtatttaggggaccctctgtacctggtcaattgatgcaaagcagtagatgttgtcaagtattataaactgaaaaactgaggttttaaagttgtttttcttcttggtaactttggggtttgtgtgtgtgtgtctctatttctcagtcttcttccgaagtaaagacagactacctgtcaatcattatggacccagatgaagttcccctggatgagcagtgtgaacggctgccctatgatgccagcaagtgggagtttgcacgggagagactgaaactaggtaaggtgttcatttggcagatccacaagcctgtcagagaaactaccccacacagagcacttgttttaaggaaagccacagagacaagacttgggagtcttccttccagcttctggctggagtcgtggaccagaggaaatgcagtctgttgccgagacaaaaggacaaagtaacaagaaacccctgtgtgctggatccatggttactgaggggcaggtgccgggcagaagccccagaaatacgaaggtcttgtctctccaagcttaggctccagctagtctccagctagtaagtgcaagcccagatactcttagatagcaaagctactgggaacttagacacctgttggcttgaacagttcagcagagtaaggatcagttaaaccaagatctctgtgcaaacccgcgcacacacacacacacacacacacacacgcacacacgcacacatgcacgcacgcacacacgcacgcacgttgtaagatggcctgtgactttcctggtgtgctttgggccagccctcaggatcacttaagtttcacttttgaagaacagagacgtcttttccgggtagggctgatgctgtaaacagcaggccccctggacttgcccccagttcctctggctcagatggacgtcacaatgcacacttatctccagatttgacaatacagaacaatcaagagcctcaatgactgctacccaaggtgtctagaacatggcttctgaaagttttccacttgctccgtatatgccagagtcattagtggttggaactaggaaaacagattgtgagcccaatgtcctctgggcttgtcgctctcagagcaagagcgcctgttgttctgacagcctgacccttctcttcccaggcaaactgctctggggtggggggtgaagtgggttttttctggcttttctcttggggcttgaaatgactcttcttacacgaggaaaggagaatatcaatgagggtcctgttcagcttgtgtagggaaaagctcaggggtcagctaaaagctggagaaagccaggcaaggctgttaaggttagggacggagagctgggagaaatctaaatagtgagagactaaatgcagggagcacagtcgatgagctccttctgcggggtgaaggggtgaaggctcaggcagctcgctgagcccctgcgtgacattggcagggaacacagcatccttttctcccacagtcaggagctgttctcgggccatgttgctccccagtgttgttagctaggattaaacatacttcttccaggacaggatccatgagagctccttgccaactgctgaaccccgcaccccaggcccaccctacctcgttctcctcatgtctactcgcttcaaaccacagcacgccccactaggctgtctccagaactcccttaagctcagagaatttacagactcgaatacttcataaggctttccctgttgaaggcttttctcggggaaggcttgctatgggcagagcctcagctgtgacttggcccgtgtccatctgagtgtctctgttggatgagggcgaacgggcatcaagctttttagtgcacggtgtggcgacaagatgggaggagctctcctctgattaacgtgggagcgaggaggccccagacatcttggatcctgctagccaaagaaatgacacaacgatttgaaatcgtggctagcaacgaaaggaaccaaggttacatctagattggtggagaggggaaaagtgatttgaagggcactgttgcattggagagaaagaaagaaagaaaggaagaaagaaggaaggaaggaaggaaggaaggaaggaaggaaggaaggaaggaaggaaggaaggaagaaacacacagaccgaggggtgattttagccatgtcttctctgttggccacaatgtccagccttgtagaaggcacattggaggtttgcctgcctgcctgcctgtccagttggagcttgatgttgttagtatgattgctgaaatcaagagtggggagttgggggtgggggggacatggacaacttcctgactccttcccaattccttactaaccctgggagaggattcaacttccataaacgtacaggatactgtctgacacaacagaatacttctatttgaaagcaacgtgcaggagaagttgcctaacatggaaaagcgcacgggaagtttggagctgagtaatcaccacagccaataagaccagttcccttgatttcaaaagagcagtggcattgattagttagctttggtcatggaggccagagtagctaatagaaacttaggaagggaaggggtttgttgttgttgttgctcgatgatgatgatgatggtggtggtggtggtggtgatgatggtttcaggaggttcagcccatggtggcctggcattgtactcaacaaagtatcatgatgtcagaagcctgtgatcatggctgctccttgcttcatagaggacaggaaacagagacaggcagaccagggcaatggagaacatacctcacaaaacctctccttgtgacctaaatcctccagctcagacaacctcttaaagtttctagagctcccccctcccccccaacccaaaatagcaaccccacctctggagtaagctcgcatgcaatgcttgagtctgtggaggacatttcatattgaaaacataacaggggccaagctcatgctgccctgccctctcccgagagtgacagggacttgtcacggccattccattacccttgcattgcatgacagtgacctaacacatttctgaactagtgtggggcattccagacaatgctaagaattccagggaaagagaatgttgcggctaggtcaagtccagtgtgagccagtctcactggaactagaaccagggatctgaagtcagattccaatgcacgagatgatcacagagcctgcgaaagcgtcatatcgatttatggggcagcccagtgagaccaacttgttcccactgatggaagcagaacccccaaatgcctgttaacacaaagtgtggaatgtgcagggatggctgagaagggatatgtaggggtggaccctggagaaaggcaggagcctttggagtgtgtggagagattatcccagtgtttcctgggctccggacgcttatcagatctcagaatgtggctgaaggacaacactgtagtaaccctcaaccaaaatatgccatttgttttgaaagtcaggagacccccaaagaactctcccctacccaacttggatgcacacacagcacttttgggggtcactgtttaagcttctgttttaacttcgagtccttctggctcagaccattttacatgaaaggatgtgtgactgtgtccctgtccctgttgcgtgctctgagaagaatcagattcagtagtcaccagctatacatgtctgactttagaaagccatgtcatctcctagtatggccctgctgaggagagtgagtcccaggagacaactctcatcactgaaactgcccgaatgcctcacggagggcagtcaacttgaagctgcagcaagacatagttgtgtataagtagacaagggctgagacatgatctgtgctttgtcacaaagcctacaaaaatatctatctatccatccaaccatacacaaacatggatatatatatatatccatccatccatcctttgcgggaaggaactagagaaaggaagactaattaaattaactgaacgtttattagcagggcagtctgaggaaggagactggaatggaaaagaagggttaaattagcattctaactggcagaatttttttttggccaatggcattctatcccctaccccattacatcacagtacagaagagttgaaagaagttgactcccatggtctactcttctttctgcgtataatgctaaggacagctgctttcttatgtggctctatttagcttcctaattgtgaaaatgcaggacctaaatacaaaaaaaatgcagaattccagaaagtttccacctaaaaggctttcagctcccccacctccagtccacagggctccctagttgctaacctccagtcctaacatggctctccattctgctgtaactggacagcgtctcctttataccagttatcacaccagggacttggcagttcagacagtggccttccctttttgagtcaagttttcctcatccaagagtgaggaaagccatggattaatagttactacagcaaaacagtacaggcaccacaaaagataccctgctttcttacagtttttggtaatcgcctctctggggttgaagcaaattactacctgtgtttgatggctcatgttctgaaaaccacaagggcttgtaatggtcgtatacccgtataagagctaccaggaaatgctctggccagcacggaagtctgagaaacgaccaagtgcttattcttgagatccgaggcatcgtcacaccaacagtagtcaccgacatacatccattttacagagaatgtagggaatgacctcagtgacaagaaagagggcttgaaacatcttagtcacggaacagagagacgctccctgggtttggtgttttctccctctgggagactctatggccagtgggaatggccactttccttcactgaatgctctagaagcttagacccatcttgaaggatgtggtggggtgggggtggggcactcagaggcagataaatgagttcagaggaagggacaccttcctttccgtcagtgcccctttgggatcactccattacggaatccctttcaaagatgcgcactttgcgtaacacatgcaaggcagcatttccttcccagaaaagacccagactcggctgttggctttgcaaacaaaccaagaccctcttctattgtaggcaaatcgctcggaagaggggcttttgggaaagtcgttcaagcctctgcatttggcattaagaaatcacccacctgccggactgtggctgtgaagatgttgaaaggtaggtgtgccatatgctgggttcggctgtcaatcacctttcacctctctgcaccctccatgtcagagcaagattcatgtaccacgggaacacatgagttctctctgcttcagccagggcttctgtgtgcctggactgtagagtcagctatactagctcagaataaaccttgccaatgaaacgacccggaactgtccataggaaaatgatctttgtcattctaaggtctttctgttctcatatcctagacgagacacctgaggacttagctctattatagtcctgggctcaaacggttacagttgccgtggtccaggtccaggtccaggtccactgtggttgttaggcaactgtacactccacaaatcccaagggctgagcatgggtttgccctcactctaaagggaaactataaagctagagaaaactggctgatcaaaaattttattctatgatgttgtcaagccccacccagaaaacatttcttctttataaataacaataaaggaattttataaaaaggaattccatctctcttatattgaaagagagtctagtcatagactactaggtggagggatggcaaatctcattgtgatgtatgatggccaccctcctaccgactagaaacaagatgcaaggaagcgtgcgtacaccaaagcctggaagggtcatgtgtcctttgcggtgtgaaaaggcttccttcttccccatgggatgaaataggcacaatgcgcttcagatcaggatttcaaaatcaagatggagggagaccaaaaggaaaccacttctgggctttccacagtctccaggatggtgggggaaattttatgctttggtttgggttttgagaaaggttctcatgttgcccagtgtggtctcacacttcagatcctgctgtctccggctcccaatgtctccaccaggcttggctgggagatttttgaggtccagggacttgtgcacacagctcagagtccccgagagaagaggtgtccaaactctcgtagtgcttgctccattgacaccgtactctggaagcctgcataaacacatttctcacctcaaaggggctatgttcatcagctaaagccagataagcatccttaaaggagtgaggctggaccatataccataactcagactggacgtgtgctccccaacacagcagggtgactatgaccactacaatttattatatttgcttctgtattcatgtctaagtgtgtgtgcctgtttgtatgtgtactacaagtgcccacagaagtcagaagagggtgtcaggtctcccggaactagagctctgggtggttgtgaggtaggtgcccagagtgggtgctgggaactgaacccaggtcccctaagagggcagcaaatactcttaaccactgagccaccttccaggcccacacagtatgttttttatatattgtataaggaaccagaagagaggagtttaaaagcttccactgcaaaccaacaaacaaggagaaggaaatgttactgaattaggtcgctacacattatacatataccctgtattgtagcatacaccgtaaatgcccacagttgttacgctccccttgccataggagtttgcttgggagcagactacccagatgagagtgggcatttctgtgagaatgccatcagaccagcactgtcctctgaggagaagtgacatctgcgggacttctgctggggaaagcatcaggctgggcaccaacatcttttctgccaactaccctgttgatgagcaatgttactccccagttgcagacaggaaaagtggctcagaaaggcttagccatctaagctgctgaccccagctttttctccttgccagaaagggataccatcttcagggactgttaaatgataagagagaaggttctaacctgagattgtttccaaggctgatctcttctatgtaatccagaaaccatgtgtgaaatctatttgtaaactcagggctgaatggatggctctgcagttaagagcactggctggacgcagcttccgttcccagcagccgcgtggccgcttacaactgcccgtaatgccaattctagaagatccgaggctctcttcgggcctccacgggcaccagacacacatgcactgcacatatatacatgcaggcaaatgatcatatacataaaataagagtaaattaatccgtataaaggcatcttccttccactgtcagcattgacagaaaaaagatttccataacaccctcgccctagaattccgtcagtaaaataaaaacaatcccccaaactttcttgcttaaagtagtttacattctgttccagggaaactagaaaaaaacatgatgccaagcaaagggcatagtcaaaagctctttcagtgtgtccctgagcatagccttaaactttctggagttttgggaaaactgtccatttggaaaaaaaaaaatgtccaaaatgagaaaactaatcacgctgtttatttatccaaaaatatttgttgagcagacactgtaagccagccctaccccactggggctttgagtttatctggttattatttaaaaaaatccatcttaataaaataatatatcaatatctactacaatattaagtgcacacacctttgacccacttccaggattgtgttccacagaaacctttgcctttgggcacactcacactgggatgttctggtgtagctatatttgtaatagaaaaaaaagagaaaagagaaagaaagaaagaaagaaagaaagaaagaaagaaagaaagaaagaaagaaagaaagaaagaaagaaagaaagaaagaaagagggagggagggagggagggagggaggaaggaaggaaggaagaggggcaggggagatagcttggtctgtgaagtgtttaacgtacaaccgtaaggatctgagttcaagtccatgaagctccagaccacagagagaccctgtctcaaagtacatggtgtgcacagatcctgaggaatgacacctgggtttgtcctctgacatgtacatacacacacagacacaggacctgcctggaggagccacacagagacagacacacagacagacagacggacacccaactgaagactatacatgtcagaagaaacgcatccgtccattaaaaggaatgaaaagagggctggagagatgactaagaggagacaagcccttcttgtccttgtccttgaggcgagttgaattctcagcactcacataaaagaaaaataaataaagcaggatgagaagaatctgatattaaaaggggggggtgaatcaatgtgtgtgagcgtctgcgtgtgtgtgtgcgtgcgtgcgtgcgtgagagagagagagagagagagagagagagagagaggaaagtcagaggatcatttgcaagagtcagtccttttcttccacacatgggttctggggctcgaactcaagccttagcagcaagctccttcctcactgagccactgagctagccctcggtgggtatttttaagtacatatggaagggtctgaagctcaccttgttgaccgtgactgcttcaaggaagcagattagagtggcttgcactttttactctagcacctcagactccttacgttgactttcgatctcttattatttgtcttttccggtgctgaaaagctttgcacacgctagagctgggctctcccactgcagacatgtacacatacacatgcacgggtgagcatatacatgcgtgcacacacgccccttcactgatctccatattcatactgttggaatattttacagaaacactttttagtatctttaaaaaaaaaaaaaaaacaactaagattatgaatacctcaaaaatgaatgataggaaaaagagcaggcgggactcagtctagaatctagactgttggttcctggactgacacagatcatctccaagagtgaagttaaagggggtggggggaggttaaggacacttgctgtcttgtaaaggacccaggttccattcccaatgcctacatggtggctcaaccatgtgtaactccagtgctgagggtcctggctggtgcccttttctggtctccacacacatggtgccagcacaaggctatacacattaaaaaaaaaaaaaaaaaaaaaaaaaagagccggaaaacacaaatccttgttgcctgagataacccttgcattccaggcgtgaaggtggctacagagaaaataacacagttccaaggtgttacatacgcagttagcttgatatcgtagaggcccccaacctctttccttcctggtgactccctgaaaggagactgggagggaaggtgtgggtgggccccctgcctgcagggctcttgcctcacctgtttttgctagaagggaggcttctggaaagccgaggacgtgaggtgccagttctgagtcagcacattgtcagcacagccgggtccaccagaaggaaacgtccggtgactaaccccatccacacggcgggcctcagtgcagtgcaaaggatgttggctcaggcggggtgggaggaataaaaacagtctggctggtgacttggcctttcgcagaatgtggggaagttaatgaagcaaggacaaacaagggttgcaggcatgcggcctccagtgcagggcagtgcggaagcagccccattgtcccagagccctgacttttccttgcttctcacacagagggggccacagccagtgagtacaaagctctgatgaccgaactcaagatcttgacccacatcggccatcatctgaatgtggttaacctcctgggagcctgcacgaagcaaggaggtaaaggagacggaggaggcctgcgccatctgcgccatctgtcttgctgagaggggagctctctactcacaaggctccctccctcaccccgccccagtccttcatcgttagaaagacactccattttagatcttctgggtcaaatggagggccttttctctcaggatgactgggggagttgaacgtgagatggtaaaggtttaagaggctacacaccccctgcagcttcccagcaaccacacagggtggttgtaacataggaaataatcagagaggcccctcctttctgatcagctctcaagacaggtaacaggaacatggctgggctataaactgttgaacccccagtatgcccttgctggtctctcttcccctgtggcaaggtgaatacttgggtgtaggtgtgaacggatgctcaagtcatgccagtggcgccaaggagttgtacaataaatggtcttcagtttcccaacacgaagcagaggtggaggagcatggggaagaaaaaaagggagccaatggaaggagacactgagggctgggaggccagaaagagtcctcgtgaaccagacaagttccccatagcgcctaaccgtgcataagtcgagcgcctgccccagtgacagcattctgcgtccctcaaccttgtacctttgagatgtgagcctccaaggctgggcagctgaaccccagccaaacctgctccttggtggggagaccccagctctagaagcaacttcctttctggagccctgagggatgagggggtgcttccttccccccaaactgttttcactgcagaagggtgggaagaggacaggtagcctctgtgctcagcatggctggctctctttgaatcatcggggtggggaagaagagaaaggagtattttgtttggtgacatttaaatatctgtgttcataaaactttattggaagagggccatgttctcggttatattaacaaggccgggttttgtgccacagaagctgaatcgagccttgactcatggcctctagtctcaggtgcactctcgggccctacccatataaaaccaggttggtttgaggtctcgagggctgaccggaagctattgaacggctgtctgacctggtgtggttaagcacgtgttgtttgggctgcagggcctctgatggtgatcgtggaatactgcaaatacggaaacctgtccaactacctcaagagcaaacgtgacttattctgtctcaacaaggtaaggattcaccctggtccctctctgtggctgtggcttatgggtcctgacaagggtccatctctgagggaagtcagggtaggaacccaagcaaggacaacagaggaacactgcttgctgcctcagttgccctggcttgcttagtcacctttcttctatggctcaggaccacctgcctagggattgtgccgcccactgtgaacaggccttctacatcaatcaatagtcaaaagaaaaaaaatccctccacagacatacccacaggccacagtgaggaagagaactcctcagttaaggttctctcttcttaggtgactctagttcgtttgtgtcacattgacaaaaactagccaggcctagattctaaaggtatggctgttttttaatggcagcacttgtgtatgtttgtttgtgtgtgtggtttgtgtgtgtgtgtgtatgtgtgtgtgtgtgtgtgtgtacacatatgtgtaggtgcactttacccatgtgtgaatcccagaagttgacatggggatgtcttcctcagctgcctctccaccttagttttttgagacggggcatctcactgaacctagagctggccggttcctctagagtgactttccaatgagcctctgggatccagcttcctctgtctgccctaccttgaaagattttgtgtagatgctagggatctgaacagaggtcctcatccttgcacgagattttatgcacttgttcctcaaagccatacctgtgactataggacaactgattagcttcactaatcagagaaactaaaggcacaaacaactgaatggtttccatagttaccaatagatcagtgatggactacaacaggaaatcatgtgtgcttaatctagtgctctccctcttctatttcattattgtggttgttgtgtatttgcatgtgtatgtgttatatgcatgttgtgtgtgtgtgcatatagtataaatatattatatatgtatatataacatatatacatatatgtgtgtgttgtgtttatatatatgtgtgtgtatgtgtgtattgtgtgtatatgtgtttgtgtgcagtgtatgcatatatatgcaggttgtgtgtgtgcatgtgtgtggtgtgtatgtgtggtatatgtttatatgtgtgtgttgtgtgtgggtatatatgtacacatatgtgagtgtctgtgttgtgtgtatgtctgtgagtgtatatgtgcattgtatgtgtctctgtatgagcgcgaatgcacatgtgtggtgtgtgcacagaggccagaggaagatactggagtcttgctctgtcaatctcttccttaccccctcaagcctgggtctctcactgaacctggagctaggctggcagctagcaagctccaaccatccttctgcctccacttcacagcactggagttacaggtgtgccaagccactctgcagcttaaccgctgtttttggcaggagtggagtttgggttcctctgctttcccagggaggccctgcacttgcggcatcattctgcatgaaacacacacacacacatatgccacacacacacactacatatacacacaccacatgcacacacatacaccacatatatacacactacatatacacacaccacatacacacacatacaccacatacacacacactacatatacacacaccacatacacacacatacatacacatatacacactacatacacacacaacatacacacatacacacatatacacatacacacaccacatacaccacacacaccacatacaccacacacaccacatatacacatatcacatacacacacaccgcatacacacacactaaacatatacacacacacagagaacaaacaaacacacaagaatactgggaggacacatagtctttcaggaaaggccagctctaaagaagaagccatggattcaaacactgtggtatgctttgtggtcccactgctgtccctctctgggctgaattggccagggagacagtgactgacagttagccagtcaccggcatctgggaggcgcacattggaggcaagctctctggctccacaaccagattttccaggtttaaattccaagtctcctctcataagacctggccttgaacaaattagtcagtctctttaggctccagttccttgtattcagtggcgctaataatagaacccagggtgagactgttgggaaaacgaaactcttcccttaagcatttagttgtccccttttgtcaatttttatccactaggatgttgaaggatggggtgtagctcagtgggggagttcttatttgtcacgagtgaggccctgtgtctgtcccctcccctgcattagaaagacagagacagagagaatcagagacacacacatagagagagaaacagagagaaagagagagagagagagacaaacagagacacagagagttcaattgaacacagctaatgcacatggttgaatgaaccttcagagttctaggaacggtgcccatctctgatatgtagggaagacaccacagaagacaactagacgttgcagtacctgcaagcagttctggctgctgagatggaggattgtgtgagcccaagtgttagacatcagcctggaaaatagagtgagaccaggagtggagagatggctctgcggttaggagctctttctgctctaccaaaggtcctgagttcggctcccagcacccacattagatagctcacaactgtctgttactatagctccaggcaatctgatctctctactcactgagggtgcctgtgctcagagacgcacacgcagattcacacatacccttatatacataatttaaataaataaataagtatatacatatatatggagagagagagagagaggtggggggagagagaccttgttacaaataaagcaaggaaaactggatagctgacccaccttttcatctcagactatggttttatcaaagacatagttgtcccaccagactgttgaatatattacatattccctcattctattgtttgagacagggtctcactatgtatccctggctgtcctggaactcacagagatccacttacctctgcctcctgagtgccagaattaaaggtgtttaccaccatgcccagctatatttcccccttataaactaggctttccaaaaactgaaatcttaaatctactctgtgctctgtgtgtgtgtgtgtgtgtgtgtgtgtgtctgtgtgtgtgtgtatcaccagagaagtcaggaaatggctggcaagatggctcagtctagataaagaggcttgctgccaagcctgatgacctgagtctgatccctgggactcacatgatggaaggagagaaccaactccagcaagttgtcctctggcttctgcatttgtgcacgcagcagacaagcacaaataaatatatatatactagtgtaataaagaaattggcttaagaacacagtaaccacaagataaagagaggagaaagacctatcttgcttcacctccagctttagaatttttttctcagacccccactaaataaggggtgcagcggtgccccgagctgagagcagcacagattcctgtcgatcttgatgtcctagactgggctcaggaagcgctaagccctcagaacaccccagggacttggcaggatggagcgtttgggtttgtgcgtcctttgtttggaggagcttgcttcctttcggggctatatttactggtttacttccccatggcacttggtggagctgtgttttatggaaaactcatgactatctgtcacatttggaacctaaaggaataggaaggagagatggaggaacggcccaaatccgtcaagattcttaaatgtgctttgtgattaacctactattctgccttagtccccagagtccactaacgtaacctgtctttggtggcacactgctgctgagcatagctgaactggggtgcgaggaagggtagggtaacctggggacaggttctaccccgtagcttctgagagctgtgaggaagaaggcagtacgctttcagaaaataaaactccagactccgtctgagcagggctagctgcctcgtggagagaaaaatgatggtcctttggactgtttggctttctacctgccacgaggaaaaggtgtctagggtgggttacacgcaatataacttgtcttcactcctgaaatcccagacaggatttgagaagaactgagagagcaaaactcccttcagggacatgactcgaggaaatgtttgtatggggtgtgtccccaggagactcttttttttcaggatgtgggaacccctctgtaccctatatcacagtgctgcttgctgctgtccctcctaaagtttgttggatcttctgcttgctccctggcgccctctagtggaaggactgcttcttcttagtgacatcccagaaaagtcaaggctgtttaatcctagcgctgaacttcattccctcccagctcctgtctaggtacacagaagccagcagaagccaggctgtacggtacacaggcccctgtgggtatatacacatgcgggtacgcatgggcacacagccgcgtcctgaaagccactgagcaggatgcgtctctagtgtgaagcagtagatgagttacggtaggcaaaacagtagaacacggaagtcctttcctgcgaggcacaaactgtaataatatgtagtgccttccagacgagaaagatgaaacgcagacaaacatgaaaggatttgcccatgatggcatgattagtagaggagccagaagactctatagagaaggcagaggaaaagcagcaagattcagatgcccacagtgagccgcctttgctattcatgataggatgcagtggtgtgacatcctcaaagggaaaccaagagaaaggtgtatctcctcttctctccccgaggaaatgagaggaactggtaacttgagcctctgcagggattacagaggctttcacaccacctgagtgaggctatcaaactctctgtcacctttcaaacaacagggcatgtgctacaaaaagcagcagagacagacttggttggacgctagcgcaagctttcaggctttgccaattattagctgtggctttgatgacttagctcttcagaaccagcttgtgtatgaattgttttataagggagggagagagggagggagggagggagggagggagggagggagggagggagggagggagggagggagggagggaggggaagagggagaaggcttagcagttaggagcactgttcccccagcacccatattggcacaacctgctttgaccccaggtctagggaatccaatgacgttgtctagctttggtagacacccaaatgcatgttcacatacacataaataaaaataaaataaatctattttaaaaaacaaatcaggtggtggtaacacacacttttaattccagcactcgggggatagaggcaggtagatctctgagttccaggacatcaaggactacatagaaatgctgtctcaaaccacgcccatacctcgtaagacaaaacaaacactattttgacaattatttagtaaaatgacataagctcttggggaagttgaggaagtgtatgctagctcacactaagtgttcagtatttatcagttgcctggatctgaggtgttcactaggaacccatgcaagaacataaaagattctacagcctgggaaataaatgcctagcacccagtgtgcattcggggtccagtggcttgtccaatccggacggcagccatctctgccttgggcccctctcactcctgtgcttcttgtctatgctaaggacgcagccttgcatatggagctcaagaaagagagcctggaaccaggcctggagcagggccagaagccccgcctagacagtgtcagcagctcaagtgtcaccagctccagcttccctgaagaccgaagcgtgagcgatgtggaaggagacgagggtacgtatccgctcctcccggcctccagtctcggggatttctacaacacactacacatctcacacatttttttccttccggatttatcaccctaataaacatcctgggaatgggggtaatgtcctaccaggtcacacccattgtgcccaatctccattcccctacccttcacccccacccctcaaccccgcagcctgggaaaacatctctgatgcttgagttgagactcaaactctcttgccaatgaactgtggcgtccttggtgtgtcttatactttgtgaatattgtttcaataaatggggatttggtgcaggcacaaaaatctttacaagattcgaatgctccgtagattacagtgagatctccaagcagcccctcaccatggaagacctgatttcctacagtttccaagtggccagaggcatggagtttctgtcctccagaaaggtcagctcatctctttgtagtctaactttatttaaaaaaaaaaaaaagaatgttttttaatactgcaaatcttttatatatgcatatgtacatatgtacacacatatatacacctgcatatatatatatatatatacacatacacacacacacacacacacacacacacacacacacctgagtactctgtcttcagacacaccagcagagggcatcagatcccattacagatggttgtgagtcaccacatggttgctgggaattgaactcaggacctctggcagagcagtcagtgctctttactgccaagacatttctccagccccttctttaactttcttaatcagagataaaaaaaggttttgagtttttttcaaaagctttcactttacattttagaatttgtttttatgtatgttattaaacttagaacatccaacacacgtgtgcctttcaagtctcttccctgctccccacttttattttgaccttttaaatgatgtatgaaaacatacagattgcatatgttaaccaatatacaagaatgacatcaattctcaacttaaatcgggttggatatatttttataacttaatggtaacgtatttgaaaatgcattctgctactgatttgtctttttgtgaggcctggacacacacctctgctgtgaagctatttttctagtatttgtttatatttgtttaggttgttaactatacaccagacctcaccacaataacctagatttgctctgatatggagaggtaccaggatattgagcctgcggatagcatttaagggtaaaatcttcctgggtattttggactacacaaacccaggagcgctgtcttccacggtgccctctggcgtgcttctaaactctccaggcttcatgaagaagctatcttcagtatacccacctgaggcttctcagaaaccctcagctcaagcccaaaccatgggcatccaggcacctgagaggccaaggcagggggattcctggttacatgccaacctgagtgagttccgggtcagggtacacaacacctcgggagtctgtcttaaaaccagcaacagcggcaaacaacgtaaacagccaacaaaacaaatcacccctaaccacagctcccaaagatctgctctaaaaggccacaggggaaaatctcactcactggcaaaattcagactgccggtgcggttgaccagtacgctcccatagaacaggagcctggctgatttagaacgtgtcctttgagccacctggaccttgtacttgcacaagaagcacattgtgtttatggtagctaggtgtgtgctgagagatgctccctctaccacagatgaaatggaaattagaattaagaataatgataccagggccagtgagccggctcagcaggtaaaggtatttgctgccaaattgatgacttcagttcgatcccaggaactcacacggttgccctccacatgcatgtcatggtatatgcatgctcacatgagtgcttgtgtgtgcacacacgctcactcgcacatacacacatactcacacacactcatacatatacacacacacagttgtttttttttttttttcaaagaataatgacccagagtggatacaggaaattaagcagcttgattcgggaagtgcgttcattacataactgttttattacagtgcattcatcgggacctggcagcgagaaacatccttttatctgagaacaatgtggtgaagatttgcgactttggcctggcccgggatatttataagaaccctgattatgtgaggagaggagatgtgagtgagcttgggggcgcgttcgatccctttctaccctgtcgagtttaggccacagaccgaagcccttgcaaacacttacgtttctcagcagtcattccccaaatgcccatgtggctctgcgaagatagatggtccagaagagctgtgtgctgagaactctggggatggaatcttctttctctgatccctggctgggtacctgtcctgatagaaggaccacttgagacttgttaacctgagcagccggctgagccctgcagagaccacatcagtctctgcccaccacccctctgggagtcccatgtcccactgaaaagaacagcgtggcctcttcccctcagataagccccggtgattgattcagcaggtgtctgtacttccggaaagagtgcgggagggtacacactatcttgaacggaggaagctgcttacctccagggacgccttccgtgggacccatctcccttctggctcatgctggcctctcttcctcatttgtttttgaacataatgttatttgtcacttactgggtgacctttagtgtcctctcttgtctggcctctgccaggagggcttcagctaataatgtctgggttctcttgattgctctgcagcagggctctcagactgtaggaaacacacacatcacctagcagcctttctgaaccaagacttgctgtcctcaccccagatcccttgatgcagaaggtccagagggagggtgaggaaggtggggagggtggggagggtggggagggtggagggagactggaatctgcactttcaacaagtttctggaccatactatgcggacacccgggggaacacactttcagaaacccttcttagttactgtttcttttctttttaacttttattttgtgtatgagtggtttacctaaatgtgtgtactgcatgcatgcagtgcccaaggaggccagaagagggcgtcagattccccgggactggaagtacagatggttgtgagtcaccatgtgggttctgggaactgaacccatgtcctgtgtaagaacagccagctttttactgctgagccacctctcagcctctcagctactctttctaaaaggaaaatagcccagtttgcagtggcgctccaggctgcagagactgcttccgcccgtgtttcagtctgaccctctttgctgtccttggcatctcttcattcctccacagtctttgtctctccagtgtcccagacatcttgctttgcttcccccaatctcccaaccctgccagcaggccaaactcccacaaactaactgtggtccctgctgtcagaacaggtctgcatgcttgggatcccgccatctattctcctaaatggagaactttaatataaagtcaccttccctcattccagggatgtgggagattggatgggaactgaagccaggctctcagacatacacattccacccctgagtctctcctagctccaagttcaagatttaacaacttgtcctttttcacagggatatctttcacaaccttagaagaaattcgtaggaattgctatcaattttcaggatatttcctaattcagacctctttaccaagcccttagtgtccctgtgtaggcagggaaggtaccatgagaacacagcttctttaagaaccatggaaccaggaccttctaggtgcaacagagaagtctacttgccatgcctgctctccagaggctggaggatgaccacgagctagctctatgcttttctccggtgtaggaaactgcaggtgttctggttcttctgaagtgttcagtggaaggggacccccgggccctgggtgtggacatcacttttgttagcatgctcaaggccccactgctgtcttccagactcgacttcccctaaaatggatggctcctgaatccatctttgacaaggtctacagcaccaagagcgatgtgtggtcctatggcgtgttgctgtgggagatcttctccttaggtaaatgtggaggagggagaggctggaacagcccagaagcagacgtctgtgtgctatgcagagcatgcagtggacacagcccacctcgaggtctgcacttgaactcacacagtgttggatgtacagataccacacggagggtttaaaccattctcagcagagtcaggtggcaggaattctaaagacagagctgtctgtcagtctatcctttgcccctttctatgatatttccaacgccagctctcatgtcttcaccccttcttccctctatgtgtctgctgcctcagagtttcttctcagggcaggtcctgatgtgcacagctggaccagaagaaggcattgttagaggcagctggctttgatctagtgcctttggtgtaaatatacatatacaacatatgcacatatgtatgtatatatatgtatatgtgtacatgtaaacacatatacatatatatgtacatatatgtgtgtacatgtaaatacacatatccatatccatatccatatccatatccatatccatatacatatacatatacatatacatatacatatacacagtgtgtatgtgttacacatatacatatgcccagagcatgtgtgttgcgcctacatgtaatgtctgagcaccatgagcatacagcctgggagagggcatcagatcctctagaactggatgaacgtggagctggaaattgaacctaggacctctgcgagagcagccagtgctccagcccatctactctgggtttctaggaaccgtcctcaaagccctgttccttcagatgcacacagggatggcgaggcgcccccaagtgtgaaaactagccaaggatctttcaggctttgccaaaataaaaagaaagaaagaaagaaaggaaggaagaaagagagagagagagagagagagagagagagagagagagagagagagagagagagagaaaagatgcctttcccagcaaataaaatgcatgcggtaacacccctaggttcctgtaatgtgtgaaaagcattcccctgccttcgatgacaggcacctgttgcttccagtccttgaaagccgcacagtagctctgatggccttgctgtaacacggtgccaagccctgcacgtctcacagctgcttcctatcagtagccattactagaaagcacaggcaaacacgtgctgggtggccttggctggagggctgagcagagtgtcctgcaatgccttacccaccctacctagcccaggctacccacaagaggactgaccaggcactgttagataggctggcaaggacagtaccctcagcactgcagactctggagcagcccccatccaccctagccagccttgccccgggtgcccaaggctcgattcctgagacccgtgataacccctcattcttaaagcctcagaatgaaggccattttctgaaaggcaggagtggttcgttggtagcctgatccaagtccattggttttccaaagggaggttattaactcaggccacagagtcgaaggatcagatttccttagagttatttgtggggcaaagacaggaatactttagattgccttttcctctgaccaaacaagcaaatatggacactgggacagccacgaatcagccaaggatgtgccctcaggaaggacctgccaagcacctccctgtgccagggtttacctcagccactggaggtttatcatgaaaatgtcactgtagagttatttttgggttttttttttaaagataggctcactagatagcccatgctagcctcaaactaacaattcccttcctcagcctctctcccaagagctgggattacagtcatgtaggacctttctcagctaaaacatcactttgaggaagggagggaaattgcccttcatggtctctttgtagccctccctgactttgaactcataagagatccatctgcttctgcctcccaagcgctagaactgaaagtgcaccatcgtgcacacacacacacacacacacacacacacacacacacacacacgcccccatggtcttttgtactagaagccttaacaggaatgtgtctttccacaccatcccttgtagggggttctccatacccaggagtgcaaatggatgaagacttctgcagccgcctgaaggaaggcatgcggatgagaaccccggagtatgccacacctgaaatgtaagctcacacctccgtgtccctcccacccccccactgagcgctcatcagggacctggggcgtggtaaggggcacagggtgcctggggtggggagtgagtaagggcacgggtttattttcagccccactcttcagggatgctggctcagtccctactgggctctgctgtgctcaggatgtctggagcgacatcctgagcggggagtgctctggagccatccctgtttcctctctaacccacccatagagcctttcggggccattagctgggaactggagtcagaaagccagacaaaacgaatagcacctaggaactgaaggcaagacctcgttcactgagtagcgagcgcccagagaaccaatccacctctggtcaaggctcacgaggtctctgtggcactgttccccatctccagagtcccgggagcttgctttatgctgtctgtactccgcagggatagggatgtagctcagttgctctagtagtgcttactcagcatgcacaaggttcgtgggtcatccccaacactgcatattctgtgccagtagtcacagtactttggaagtggaagcagaaggatccagaattcaaggtcgtttgcagttttgtataaatatcaaggctggtctgagctacttaagaacctcttgccgctgggtggtggtggtgcatccctttaatcccagcacttgggaggcagaggcaggcggatttctgagttcgaagccagcctggtctacaaagtgagttccaggacagccagggctatacagagaaaccttgtctcaaaaaaaacaaaaaaacaaaacaaaaaagaacctgttgctaaaaacttatatataattagatgatcgattagatagatagatagatacatacatacatatatacatacatacaggatagaaaaagatgataaatgatagatagatagatagatagatagatagatagatagatagatagatagatatacagacagataagtaggtagcaggtagatagatgaaagataggtaaatgatagaaagataggttataaataaatgataggatagatagatagatagatagatagatagatagatagatagatagatagatagtagacagacagatgtggggtagctgggaagccatgagagctcttgaccaatgggcttatggaggtgcctttaggaatgagaggagataggctccgggcagcttctccattgtcggcgggcgagcttgacacttgtgggtaccatttcctgcaactgtgccgttttagcactcaacaggaatgtgatgacatttgcagtttgggtgagctgctgacaaggacttgggcctccctgaggtggcgccacctttcctgaactggcaggcggcctcccctccccacccacacacaatgagatcctgcagagccctgggctggcccttggggaagagtgaaggacagagaaggaagtgtgggcgtggccaaaggggcaaggtcactgtttctttcctttgctatctcaggaccaagctaggtcaatggcaagaccgggaactggatgagagagacatggacgcagacctgaaggcaggaaagacactgatgtactttagggaagtccaatggctaggctgacccaggaacctctgggctacaggaggagttgctttaggtttggtgggatccttgggccctgcaaagagaggtggaatgaggtcactctgtgctgatgcttttgccaagacatagtttcacataaacttcccacaatcttgaggagttggtaaggcagatatgataatctgacctcggaaaaataccaaaatctgagaaatacagcatcatgccttctgccagctaaagagcagagaagacagaagccaatcccatgttccccaagagggtgttctctgtacgccaataggtgtgtggagctaatatgccctgcttttcacataatctaaaaaccacaagaaagtttagttgccaacggtaataataattgcagttattataaaatgatacgggttaacttactctcagtagtgcttgtaggtagcaggccttgaacaagtttaatgtatctactgctcacaataaccccgtgaaatacgtgccaccatcagctgtattttacagatgacaaagcaaggcgcatgataatccgcccaaggctccattgccagtcagttagcaattgcagtccagcactcagggcccatttacagccctcaaatttatcagaataattctagaagcaggcagttactcaactttgggctgaagaattctctaaagccagatgtggaggcacatgctgtaatcccaacactgggaagcctgaggtgaaccgatagggagttcaaggcctggcagggctacttagtgagatcttatctcaaacaaacccaagattagcaaggccctgggcttatcaagcctttgtgtgtttccacaaacctcttccaggtagctcattggccccaaacagcctatagggtacagttcagaatttaaaaaaataagatatggctctgtaaaatatttcctcaaaaggaagatacaggtcagccatgttctcagtcagccatgttctcagtcagctatgttttcagtcagccatgtatgttctcagtcagccttgttctgaggcagctatgttctgaggcagccatgttcttaggcagccctgttctcagacagccattttcttaggcagccatgttctcagtcagccttgttctgaggcagccatgtttgcagggatgtgagaattgagaggatgaagtcacctccttgttccaatcacaagaaagtgatattctaatgcagtgcagctctactggacacccaagacctgagcttgggctacagtgatgtgtgtctgggaaaattaggctaatagcctgtagactcttcccacaagcccctcagctggtcttggatgcacctgaaccccccactcccaccccaccccagctttactgagtgagtggataaaactgtaatgttgcactgagtgagttgcccccaacccagtgcccgtcaatcagatgcctatcaccccacacgggtgtctgccttgccttgcaggtcagggtatagagtgagaaaagaacaagctgggagcacacctggaatccagaggtgattacaggtctccctgctgcttttaccctggagaaactagggaggggaaggcccagttaggcacacctcccagaaggctgcttccccatccaggacgtgagatgacaatggctgtggttgcagagataaggcctctgcagaatgaaatacgtcccctacccagtggctcgggcccctctctgtttcctcatcccacctttccttcccccgtgcgaccagctttagaattccgaagtcaatatctgatgttctttcagccaactttggaagccttataccatggagcttgagtatggtcaggatgaattctagcttaaggtttgcttgtttgtttgtttgtttgtttgtttgtttgtgtttttaattgaccatctgcctctgtggcatgcttttgcttaagtaaaacacagaaaacaggtaacctgtacacacttactttaaatggagatccatgtaggatcttaagaggtaatgtggcttctgctatctggcagagagagagagagaacacgaactcgggggtagtgagtgggttgggggcacttggcagtgtgtgtagggatccccagcatgctctctacacagggagtagacatggctgaaaggggagcctaaaaccaatgctgctaaaataaaaacgaaaagccaagcacaaaaaacccgttgatgtaggaacctgaggacaagattgggcctctgtgatatggagaccagtgtttccaacccagaagcgcagcctgttttggctttagtggcgagagacaactttgtcctaataggggctttgaaattctgggtgaatactaagcagccacgcactagaccttgcacacataccgaggagctaatgtggtggacctggtgtctttaccaccagggtctattgcagaaccttctcagggaagtctaagatcccttccgagactctcaggaccaacctaaggaagtctgaggaccttcccaaagaagggcaaggattccccccaaggaaatgagggtctttctgtaaggaagagtgagatgctacagacgccgatgcttacaaagaagccacgtggagccaaccttcgttacaactcaagaatgtttttagctttaggaactccgtcctcctctttgagagaggaggggtgctccacttcacacccaatcacacagagcacccctttcctatctaagcccccttctctgctctataagactcagtcctggtgtctaacaaaggtgggtcaggagttcaggagggttagtctgtcatagtgtgtgcccctgctagcaggacctgacccacacagactgttaggtgctaatgctagagaaaagcatgacacaccttatcaacggtgtgctctggactgagaaccgacaatcctcaggtaatgtgcagggcagcccagatagaccccaatgttctacagcgacttctgtgtgctcttcatcaacagctaccaaatcatgttggattgctggcacaaagaccccaaagagaggccccggtttgctgaacttgtggagaaacttggtgacctgcttcaagccaacgtccaacaggtaaagcaaagtttatctagatccgaaggctgagtgtgttcctgactgggaagatcaagaatgaaatagtggtgtgtgtgtgtgtgtgtgtgtgtgtgtgagagagagagagagagagagagagagagagagagagagagagaatgtgtgtgagagagatttgtgtgactgtgtgtgtgagagtgacttgtgtatgagtgtgtgtgtatgtgtgtgaaagagacgtatgtatgagagacatgtttgtgtgtgtgagagagagacatgtgagtgtgtgtgtgagagagacaagtatgaggtgtgtgtgtgtgtatgtgtgtgtgtgtgtgtgtgtgagacatgtgtgtgcacgcatgtgtgtgtgtgtgcccatatacgagtccttgcaggagagacttcggtggtgtaccttctgacttctgaggtttaccttcggtattctaggatgggaaagattacatccccctcaatgccatactgactagaaacagtggcttcacatactcgacccccaccttctctgaggaccttttcaaggacggctttgcagatccacattttcattccggaagctctgatgatgtgaggtgagattctgttgcctagttttattacagagagaagaggggacaaaggaggaagggggagtatggggggaggagaggaaagaaacagaaaagaaagaactgggcatctgttctgcccccgaatccaatcgttgttactattctgccacattatatatatatatatatatatatattctgtaagttggaggagctgcaggttttcctttttttccctaagcttaaaaaggaatgaaaaataagatattgtgtttcttatcttatttattatcttattcagaactgtagcctgattttcatgacattgactgtgattaaacatatgtgagtccatagaataatctaacccagagtggggagcccaggactgtaatcccagaattcaggaggctgaggcaggaggatacaagtttaaagccagcctgggttacatagtgaaactgtgtctcagaaaaaaacacagccaagaagaaaagttacataaaactaaacaaaaccagcactcctttctgtttgtttgtttgtttgtttgtttgtttgttttcctcacctaaggaatttttacaccatgcatttctgtagcagaaactggacagaagctgaaagaaccaacggttatgggagatgggcgggtcagtgagagtaattacttgttggttatagaagctcacgctacagtctggtgctgtgccggcatcttgtacataccgacaactttcgagtacagaaacatccaacagtgatgtgcaaagcatcctaccaagcacatctctgacaaatagggacttgtcaactacagagatgagaacttagcagaatgggtgactatcaaatatcagagctgagtttgcaacccaggaagtctgaccctctctgtccaggttcctaatgtcgtctgggtcctttgaggacagttagatggtcctgggaaccttctcgtatcgttacctgcaggtacctggctcaggcttaacctcgtgtctgctaccaagggcaaggcataggatagagatgcagcagttggaaaacatgaacggtcctctgtagcagggtttgaagcagacagcccagaactgtgaaggtgacaggttgactttacagctcatacccgacatctggtccaagtggctgacgcagaccggttgtccagttttaaatgataaagcctggctggggtagtaatggggtggagggtggaaccagagactcaataggaatcgagcctaagagcttgggctctgcagccagtaggtaggactgttggccaatggtttaactgaggaggaggttggcctatgagcagccatcccatggggcatcccatcaggcctttccagtagctagtcagtgaaagcagggaggtggtcactgagaaacatttgccttccttcccaattggagtttcgggccaaaatataccaggtggagccacctctcagctgtatacttctgtcagctatgaagcctcaacaggacattttgttattccatatccatttaggaagtagatagcaataagtgataagatgaagtcatgtcgcctcctggggtatctgtctcttatttgtgccattaagacactcgggccagatgagagatctcagatctcctttatgaccggcatgatttgattccacaagaaactggagtgggccattctagggtttttctgaacactatacacacacaaacacacacacacacacacacacacacgtgtgtatatatacatacatatacatatgtatgtatgtatgtatatatgtgtatatttatatatgtatgtgtaaatatatttatatatgtatgtatatatattgtgtgtgtgtgtgtgtgtgtgtagtgactgaagcactacataggggaagtgacgttaccctgaggtaacgtcatagtataggaaggagcgagtctgagtcagttggtattttggttgctaggtggatgggtccactcaggttctataatgtcctggttcatttcattggtgtgagcctttttctcctaccttgataattctttctacgtctccatcagatatgtaaacgctttcaaattcatgagcctggaaagaatcaaaacctttgaggagctttcaccgaactccacctccatgtttgaggtaagtcatgatcataaggacacagtgctctctgtcagaagtctccccctgtcgaagcagccaccccaggcagtgcttggccagggaggaccagcgatcagtagaggccaaggttccaagatggggaagaatagacagccagacttcatcatgaggagctgatgtgaaagagaatgccacagtttgaaggagtcctgtcccaccagctctccagaaggggaaggagtagtccctgtgtatgtttccggggctctcttgtaggctggctatccaggacacacctttctttctttaagaatgtaagatgtggggctggtgagatggctcagtgggtaagagcacccgactgctcttccaaaggtccagagttcaaatcccagcaaccacatggtggctcacaaccatccgtaacgagatctgacttcctcttctggaatatctgaagacagctacaatgtacttacatataataaataaataaatctttaaaaaaaaaagaatgtaagatgtgcaagcggctgggccttgtgataccacagagaccccgtgcagaggtctgaaagaagtccatggaggccctaggcccctttagcggaaggttctgcagctgagcagccatgttcccacccagacacactggtcagagcacaccagagtaaactggccaaccagaagcttctgtcagcaaggctatggagaggcccttggacagggtggagtgggctcccgagacaaacacagtgccgtaattcaagaggaaaaacctcaatgctggggcctggagagacactgtagtagttaagagcactggctgctctttcagaggatcccagttcaggtcccagaacccacatgggggctcacagccacctgtaagtctagttccaggagacaggaagccctagtcttaagtgccagacatacatgcaagtgcacacacataaaagataaatatgacctgaacctcatagacacacacgataaagggtcacagtgacttcaaaatataaaggcatctccattgtaagtggtaggatgcagtccatgataatgtagttagaaattttgtgctgtggctcagtagggtggttcaagttccaggaataacactgagtgaacctcagaatttctctgggttaggctacccctaaagtggggcagacgatgacagcaccttggccgccctgggtcctcaccggtgttcaaatggcccaggaagagcctcagagggagggaggaaccaagtgtggagtcccctccacgtcagcagtaacagtactgaaggacaggtggaaaattccatgatggggatgactggaccacagctcctagaaactatggcaaatagggcatatgcatatgcaagcatgcatatgcaaacatgcatatgcaaatgtgcatctaaaatatgtacacatggcagatgccagagactctccaagagaaaattattcaaccacatctataatttccttgaaatcttacgtgcaatagtatactcatagccagacaccaagctttgttttaacatatatgataatttgcatatatgataatttaacatatgataatttgcatgaaaatttcacacggaaaataccaagcagttacatgcaattttccattgcatgtatgtgtgtgtatgtctacgtgcatgctgtgtgcacctctgtgcatatgtgcctgccccccaatatatgtgtggaatccattggccaaggttgggtgtctttctcaattgttcatcttactggggttgtggttgattaattggtttgtttttaaagacaggatctttcaaggaacctggagctcacagttgagctagagtagctggccagcaagctccaggccgtgcctgtctccatccccacctcctgcccccagggctgggatgacagacctgagtcacaatgcctgccttttatgagaactctgaggttctcatgtgtgccccgtaagcacttaatccactgagccatctcctcagaccctgcaattccttcttattttcttcaccttctggaaggagggtggtaaagttgcccacgacaggcactgttttgtctctgacgagctcaccgatgtcagtacaaggaacaggcacggtgctgacaggcggggggctgtgtttgctgagggcagcactgggccacacctcagtggtgcctcccagtgtcttcccagagtcactgtggagcctgcttggccaagcaaatgaatcatctttctctcctcatcccacaggactatcagctggacactagcactctgctgggctcccccttgctgaagcggttcacctggactgagaccaagcccaaggcctccatgaagatagagtaaggaagccagataggggtgggggaggaggatgccagggacggtgggatgcttggtgggtgggtgtttaaggctacctggcctcctagtgttcaggcatggcagaaaagcaaccaccccacacccagggatgagaagaggggtcacaatattaggcatatgaaccccaggctctgtgacaaggaagactggggcttcgtgtaacaggcaggctgagcctgagaaatatggggccttgatggaaaggagccaggtgtgtccagctgtgaaggacgatttgggacgtgtccacagactcacgagacaacacgtcccgtttctggtccctgggctagcaagggaacacagtcctgtctgtaaccctgagaattcaaacttctacaatcaggattgtctgcatcctgctgcatccattacccacgtctcacttgtagatgtttccacaatcccctgcggcttgatccgtcaggcagttcttccttccgttctgcatcatttcggaatcgctgggctccggctgtacagtggactggtagagatgacctcagtggttctctaagccgaaggccacccaagcctggccacttaccttcctacctacctttcctggctcaaatgcctggctctcgggtctagcaatgaagagcactgactgctcttgcaggggacgccttcttctgctgtctggaagcactaggcacacatgggggacacacagatacaggctaacaaaacacccatacacgcaacaacaaaccagatggccagcccacgtgctgcagttgattgagctgtgactggactcaaactttccagcaggccactggaaagacgggcactcccgggcaaacatttaccttttccctgtgatgcagtctcagaagtaggccttggtgttgaagttccaaattaatggaccccaatctccacaaaggaaagggtagctagccaatcttttgtatcttattaaggagtgtgtgggaggaaaagagtgggtttttgttgttgtttttggttttgttttgttttttttaacttgctctttgatgaggaaaagataaaccctaatttatatcctctaccctgcaattaaagattaagaccagagccaggcctgtccaggctggtctaccccatgtggctcatggatttctctccatcccagctctcactaatctagtgattctaacccaatattacaggctaggagatgcctttctccctcctgtgtccatcttgggctcatgtaacgtatggtacccgagaacaacagtctcctagaccctgctgcgctcaggtgctgcctgtaataactgtgccacggtctatttcctgagaccactaaccacggatgtgactagaaggaggaatttatttctacaggccagaagtccaaagtaaaggtgttggcagggacgcacgcccttcggaggcttggtgggaagtgatctatctgcctctcacggtgtctgtggcttcctgctgtcctcagtttgggctgtcctcaagccctgtctctggttggttatgactgccatttgtgtgcctactgcattggagtccacctggctaaatcagaacgagctcctcctctttaaacctcagcttaattgcagagttgctctcaggctaccaggatttgacatgatattgggggaagggcaggcagcccccccaccccactccaccccaccccacctccgatttagctgatcacaggagctacctgattcaagaataggccggggctattcccaagtcttgtttccagtgagaatcccatctcctcaaacactccactcctggccacaggcatgctggttccacccagccgcaccgaggtagtgtatatattccaaacaaagaacgtttgactagggacaggagggattctagatcaggtaaggacaggtgacccgcttaggcagtcattagtctttgcccagaaaacatcagggaggcgtttgatggactgtttctctttctctttagcttgagaatagcgagtaaaagcaaggaggcgggactttccgatctgccgaggcccagcttctgcttctccagctgtggccacatcaggcccgtgcaggacgatgaatctgagctgggaaaggagtcctgctgttctccacccccagactacaactccgtggtgttgtactcctccccgcccgcctaaagcttctcaccagccccgacaaccagcccctgacagtattatacatctatgagtttacacctattccgctccacaggagccagctgcttttcgtgacctttaatcgtgcttttttgttttttgttttgtttgttgttgctgttttgactaacaagaatgtaaccccagttagtgacgtgtgaagaatactattgttagagaaatcccccccgcaaagcctcagggtaacctggacaggaaggagcaggtgcctctggcgaccgccccgcccaccggccatggccccacccaccctccctgcagctgtgggactagaggcagtaagcccattagctcatggctgcatgcactgacctgctctgtctctcttatggaggaaagggagaacagagcaaacaggaggcacaggaaaaggctttgggatgcgtccgtcctgtggagcccgtgcaggagggggctccgctatgccacttcagtgacttctcactcctggcctccgctgtttcgggcccccttccaagaggtatcagagcagaacatgagggacgtttcctagaccagggcacatgttctcgggaaccacagttaatcttaaatcttttcccgggagtcttctgttgtctgtttaccatccaaagcatatttaacatgtgtcagtgggggtggcgcttggcttctgaggccagagccatcatcagttcctctagtgagatgcattgaggtcatacccaagcttgcaggcctgaccttcgcatactgctcacggggagttaagtggtccagtttggcctagtaaggttgcctactgatgggctcaaaagccacattttaaacaggttttatctcaagtattaatatatagacaagacacttatgcattatcctgttttatatatccaatgaatataactggggcgagttaagagtcatggtctagaaaaggggtttctctgtacccaaatcgggctggttggaccaagacccagagaggcagagtggttgtcccagctatagttactaaactactcacccaaagttgggacctcactggcttctctttacttcatcatggatttcaccatcccaaggcagtctgagaggagctaaagagtatcagcccatatttattaagcactttatgctccttggcacagcaggtgatgtgtaatttatgcaagctccctctccagctaggactcaggatattagtcaatgagccatcaaaaggaaaaaaaaaaaaccatcttattttcatctgtttcataccttgtctggggtctaatgacgatggcaacagggtagacatgggaagacagggtagaaaagggtgcccgctctttggggtctagagatgagccctgggtctctaaaatggctctcttagaagttgtatgtgcaaattatggtctgtgtgcttaggtcgtgcacacctgccggagccggtcacagctgggcagacgatgaatagctgctttgggagagcagagcatgctagccacttaattctctgaccgggccagcatcatgggtacctgctcccctgtgtaccccatccttaaggttttctgtctgatgagactggaggcccagtgcaatccccactgagacagcctgcagcccactgtggctcttggtgcactcaccagccaggactagacaagtaggaaagggcttctagccacactggagaaaaagaaaatcaggtagggctggccaaagacatctttgtccattcgcaaaagctcttgtcggctgcagtgtgtaagtcaggcgatgagacagaggctaccagagaaacggatgagaacagcagcctgaggtttctcatccagatatccagcaattggggggtgggggaagaccatagatggtcctgtattattccgattttaataatctaattcgtgatcattaagagactttagtaaatgtccctttcccacaaaagtaaagaaaagctatcgggattctctggttctgcttaaagacttagctttggagcctatgaaagttgatcagccaggaaaaaaaaaaaaaaaggaaagaaaggaaagaaagaaaaaaagaaggaagacggttccttctgagtttttagggtaggaagaaaaatggaaacttctaacgacagacatacctaggtgcactgggcctgatcaccaagaacatgattggatgctaagagcctggacagtggcattcaaaccgtttgccattcaaggcccaagtagatggcactgaggaagaacagacatttctcccagtgtgtgagatcgccagtgtgtgactagggagctgaaggtcaggcaagtctgcattagcctgagatggactgtcagggggcagtgctgttcaaagcctgttgcacgggactcagtgcagggagagggcagggcacccttgacccacggtggcaggaactgtacgtgtttgtgtgtgtgtatctgtatgttttgtgcataactatttaaagaaactggaattttgaagttacttttatatgagtcaagattatatgctacagacagaactaagacatggtctggcctcacctttctagtcatgatgaatgtatttcacatattatcttcatttaataaaattaactttcaaaaccaagttttgtattttgttctttttgttttttgtttatttgtaagtggggtcaaaggggtgggagggggtcctaggtgtgcctctgggtagggtggggacactgaatcctgggatggcttactaaataccagttatcaagcatggctcaaagatgatagcaagccatactagagcaagggcacacaacaccccaggggtcccacccagaggctgcccaggccacgagatgctgcctgcacacggtcaatgaaaagcaaactcatatcgggcgatgcaatgggattctccaggagcagaagcaacgggatgaaagggattgttttactagagaaaggcttagtgggcaacagctatacttgctgttcttgcagaggacccagttgccggtgcagtgacttcagagtctgaaattccagttccagggccccctatctcttctcttggccttctcatgtaccaggcacccatgaggtacacacacacacacacacacacacacacacacacacacacacacacacacgaaagatcctggcagaatgtaaaaggacacagaagccctgaaattggcaagatagatgtcagtgttagcaaaactacttc

SEQ ID NO: 41 - DNA, 4577 bp, Artificial sequence
  GFP with PGK-NEO selection (N-terminal)
cggccacgatgcgtccggcgtagaggatctgaagatcagcagttcaacctgttgatagtacgtactaagctctcatgtttcacgtactaagctctcatgtttaacgtactaagctctcatgtttaacgaactaaaccctcatggctaacgtactaagctctcatggctaacgtactaagctctcatgtttcacgtactaagctctcatgtttgaacaataaaattaatataaatcagcaacttaaatagcctctaaggttttaagttttataagaaaaaaaagaatatataaggcttttaaagcttttaaggtttaacggttgtggacaacaagccagggatgtaacgcactgagaagcccttagagcctctcaaagcaattttgagtgacacaggaacacttaacggctgacatgggaattagcttcacgctgccgcaagcactcagggcgcaagggctgctaaaggaagcggatagacgtcaggtggcacttttcggggaaatgtgcgcggaacccctatttgtttatttttctaaatacattcaaatatgtatccgctcatgagacaataaccctgataaatgcttcaataatattgaaaaaggaagagtatgagtattcaacatttccgtgtcgcccttattcccttttttgcggcattttgccttcctgtttttgctcacccagaaacgctggtgaaagtaaaagatgctgaagatcagttgggtgcacgagtgggttacatcgaactggatctcaacagcggtaagatccttgagagttttcgccccgaagaacgttttccaatgatgagcacttttaaagttctgctatgtggcgcggtattatcccgtgttgacgccgggcaagagcaactcggtcgccgcatacactattctcagaatgacttggttgagtactcaccagtcacagaaaagcatcttacggatggcatgacagtaagagaattatgcagtgctgccataaccatgagtgataacactgcggccaacttacttctgacaacgatcggaggaccgaaggagctaaccgcttttttgcacaacatgggggatcatgtaactcgccttgatcgttgggaaccggagctgaatgaagccataccaaacgacgagcgtgacaccacgatgcctgcagcaatggcaacaacgttgcgcaaactattaactggcgaactacttactctagcttcccggcaacaattaatagactggatggaggcggataaagttgcaggaccacttctgcgctcggcccttccggctggctggtttattgctgataaatctggagccggtgagcgtgggtctcgcggtatcattgcagcactggggccagatggtaagccctcccgtatcgtagttatctacacgacggggagtcaggcaactatggatgaacgaaatagacagatcgctgagataggtgcctcactgattaagcattggtaacccagcccgcctaatgagcgggcttttttttgaacaaaaggctgcagctggacttctagagctggtaccgaattcgattatgatattccaactactgcaagcatggtgtccaagggcgaggaactgttcaccggcgtggtgcccatcctggtggagctggacggcgacgtgaacggccacaagttcagcgtgtccggcgagggcgaaggcgacgccacctacggcaagctgaccctgaagttcatctgcaccaccggcaagctgcccgtgccctggcccaccctggtgaccaccctgacctacggcgtgcagtgcttcagcagataccccgaccacatgaagcagcacgatttcttcaagagcgccatgcccgagggctacgtccaggtaagtgtgtacggtgggatccggtctatataaggagagctgtctgcaaaccctatgctactgcggccgcataacttcgtatagcatacattatacgaagttatattctaccgggtaggggaggcgcttttcccaaggcagtctggagcatgcgctttagcagccccgctgggcacttggcgctacacaagtggcctctggcctcgcacacattccacatccaccggtaggcgccaaccggctccgttctttggtggccccgtcgcgccaccttctactcctcccctagtcaggaagttcccccccgccccgcagctcgcgtcgtgcaggacgtgacaaatggaagtagcacgtctcactagtctcgtgcagatggacagcaccgctgagcaatggaagcgggtaggcctttggggcagcggccaatagcagctttgctccttcgctttctgggctcagaggctgggaaggggtgggtccgggggcgggctcaggggcgggctcaggggcggggcgggcgcccgaaggtcctccggaggcccggcattctgcacgcttcaaaagcgcacgtctgccgcgctgttctcctcttcctcatctccgggcctttcgacctgcagcagcacgtgttgacaattaatcatcggcatagtatatcggcatagtataatacgacaaggtgaggaactaaaccatgggatcggccattgaacaagatggattgcacgcaggttctccggccgcttgggtggagaggctattcggctatgactgggcacaacagacgatcggctgctctgatgccgccgtgttccggctgtcagcgcaggggcgcccggttctttttgtcaagaccgacctgtccggtgccctgaatgaactgcaggacgaggcagcgcggctatcgtggctggccacgacgggcgttccttgcgcagctgtgctcgacgttgtcactgaagcgggaagggactggctgctattgggcgaagtgccggggcaggatctcctgtcatctcaccttgctcctgccgagaaagtatccatcatggctgatgcaatgcggcggctgcatacgcttgatccggctacctgcccattcgaccaccaagcgaaacatcgcatcgagcgagcacgtactcggatggaagccggtcttgtcgatcaggatgatctggacgaagagcatcaggggctcgcgccagccgaactgttcgccaggctcaaggcgcgcatgcccgacggcgaggatctcgtcgtgacccatggcgatgcctgcttgccgaatatcatggtggaaaatggccgcttttctggattcatcgactgtggccggctgggtgtggcggaccgctatcaggacatagcgttggctacccgtgatattgctgaagagcttggcggcgaatgggctgaccgcttcctcgtgctttacggtatcgccgcccccgattcgcagcgcatcgccttctatcgccttcttgacgagttcttctgagcgggactctggggttcgaataaagaccgaccaagcgacgtctgagagctccctggcgaattcggtaccaataaaagagctttattttcatgatctgtgtgttggtttttgtgtgcggcgcgataacttcgtatagcatacattatacgaagttatctcgagtaggacaaatccgccgggataattaatacataaccttatgtatcatacacatacgatttaggtgacactatagaagcttaacatccacttttttttccccacaggagcgcaccatctttttcaaggacgacggcaactacaagaccagggccgaggtgaagttcgagggcgacacactggtgaacaggatcgagctgaagggcatcgacttcaaagaggacggcaacatcctgggccacaagctggaatacaactacaacagccacaacgtgtacattatggccgacaagcagaagaacggcatcaaggtcaacttcaagatccggcacaacatcgaggacggcagcgtgcagctggccgaccactaccagcagaacacccccatcggcgacggccccgtgctgctgcccgacaaccactacctgagcacccagagcgctctcagcaaggaccccaacgagaagcgggaccacatggtgctgaaagaatttgtgacagccgccggaatcaccctgggcatggacgagctgtacaagagcagcggccccagcggcagcagcagcctggaagtgctgttccagggccccctgagcagctctggcccctctggcagcgccgccaagttcaaagaaacagctgctgctaaattcgagcggcagcacatggacagcggaggaggaggcgagaacctgtactttcagggaggcggaggcggaggggactataaggacgacgacgacaagctgaccgacgacctgcccagggccttccggtcgacctcgagttgccctcatctgttacgccggcggtagccggccagcctcgcagagcaggattcccgttgagcaccgccaggtgcgaataagggacagtgaagaaggaacacccgctcgcgggtgggcctacttcacctatcctgcccggctgacgccgttggatacaccaaggaaagtctacacgaaccctttggcaaaatcctgtatatcgtgcgaaaaaggatggatataccgaaaaaatcgctataatgaccccgaagcagggttatgcagcggaaaa

SEQ ID NO: 42 - DNA, 73 bp, Artificial sequence
  hOCT4_BAC_GFP_FW
gcctttccccctgtctccgtcaccactctgggctctcccatgcattcaaacgattatgatattccaactactg

SEQ ID NO: 43 - DNA, 72 bp, Artificial sequence
  hOCT4_BAC_GFP_REV
tccctagctcctcccctccccctgtcccccattcctagaagggcaggcacctcagaagaactcgtcaagaag

SEQ ID NO: 44 - DNA, 75 bp, Artificial sequence
  hALB_BAC_GFP-N-F
tccgtttgtcctagcttttctcttctgtcaaccccacacgcctttggcacaatggtgtccaagggcgaggaactg

SEQ ID NO: 45 - DNA, 72 bp, Artificial sequence
  hALB_BAC_GFP-N-R
ggaataagccgagctaaagagaaaaagaagggaaataaaggttacccactttccgcctccctgaaagtacag

SEQ ID NO: 46 - DNA, 75 bp, Artificial sequence
  hAFP_BAC_GFP-N_F
attttccatattgtgcttccaccactgccaataacaaaataactagcaaccatggtgtccaagggcgaggaactg

SEQ ID NO: 47 - DNA, 72 bp, Artificial sequence
  hAFP_BAC_GFP-N_R
ggattcagtaaaatttagtaggaaaattaaaaaaattgattccacccactttccgcctccctgaaagtacag

SEQ ID NO: 48 - DNA, 75 bp, Artificial sequence
  hMYH6_BAC_GFP-N_F
ccctcaggagtaacatagccctcctgtctctgacccaggggaagcaccaagatggtgtccaagggcgaggaactg

SEQ ID NO: 49 - DNA, 72 bp, Artificial sequence
  hMYH6_BAC_GFP-N_R
cttgcggaggtactgggccgctgccccaaagtcagccatctgggcatcggttccgcctccctgaaagtacag

SEQ ID NO: 50 - DNA, 75 bp, Artificial sequence
  mCK18_BAC_GFP_NF
gcggcggaactcctgttctggtctctcgcttcgctctcctctccagacaagatggtgtccaagggcgaggaactg

SEQ ID NO: 51 - DNA, 72 bp, Artificial sequence
  mCK18_BAC_GFP_NR
gcccagggaccggtagttggtggagaaggtggtggagcgagttgtgaagcttccgcctccctgaaagtacag

SEQ ID NO: 52 - DNA, 25 bp, Artificial sequence
  hOCT4_homDonor_F
cccgaaagagaaagcgaaccagtat

SEQ ID NO: 53 - DNA, 24 bp, Artificial sequence
  hOCT4_homDonor_R
gttcttgcatcacaggcttttggg

SEQ ID NO: 54 - DNA, 30 bp, Artificial sequence
  hALB_Hom_N_FW
gtatatgtgtgtgtgcatgcgtgagtactt

SEQ ID NO: 55 - DNA, 29 bp, Artificial sequence
  hALB_Hom_N_REV
gtctatcaacagcaaccaagaagacagac

SEQ ID NO: 56 - DNA, 29 bp, Artificial sequence
  hAFP_Hom_N_FW
ctgcaacttagggacaagtcatctctctg

SEQ ID NO: 57 - DNA, 27 bp, Artificial sequence
  hAFP_Hom_N_REV
tagtctgagggagttatgtgaaggagc

SEQ ID NO: 58 - DNA, 25 bp, Artificial sequence
  hMYH6_Hom_N_FW
cctgcctctgttgttcttcactctc

SEQ ID NO: 59 - DNA, 26 bp, Artificial sequence
  hMYH6_Hom_N_REV
aagggggcatcatttaatgctgtgtc

SEQ ID NO: 60 - DNA, 24 bp, Artificial sequence
  hOct4-Crispr_F
caccgggggaaaggcttccccctc

SEQ ID NO: 61 - DNA, 24 bp, Artificial sequence
  hOct4-Crispr-R
aaacgagggggaagcctttccccc

SEQ ID NO: 62 - DNA, 25 bp, Artificial sequence
  ALB-Cripsr-N1
caccgacgcctttggcacaatgaag

SEQ ID NO: 63 - DNA, 25 bp, Artificial sequence
  ALB-Cripsr-N1
aaaccttcattgtgccaaaggcgtc

SEQ ID NO: 64 - DNA, 25 bp, Artificial sequence
  AFP-Crispr-N1
caccgaataactagcaaccatgaag

SEQ ID NO: 65 - DNA, 25 bp, Artificial sequence
  AFP-Crispr-N1
aaaccttcatggttgctagttattc

SEQ ID NO: 66 - DNA, 25 bp, Artificial sequence
  MYH6-Crispr-N1
caccgcaagatgaccgatgcccaga

SEQ ID NO: 67 - DNA, 25 bp, Artificial sequence
  MYH6-Crispr-N1
aaactctgggcatcggtcatcttgc

SEQ ID NO: 68 - DNA, 20 bp, Artificial sequence
  hBMP4-FW2
ggaggaggaggaagagcaga

SEQ ID NO: 69 - DNA, 20 bp, Artificial sequence
  hBMP4-Rev2
cactggtccctgggatgttc

SEQ ID NO: 70 - DNA, 18 bp, Artificial sequence
  hSOX17-FW2
cgccgagttgagcaagat

SEQ ID NO: 71 - DNA, 18 bp, Artificial sequence
  hSOX17 Rev2
ggtggtcctgcatgtgct

SEQ ID NO: 72 - DNA, 21 bp, Artificial sequence
  hAFP-FW3
gccaagataaaggagaagaag

SEQ ID NO: 73 - DNA, 20 bp, Artificial sequence
  hAFP-Rev3
tgtgtaagcaacgagaaacg

SEQ ID NO: 74 - DNA, 21 bp, Artificial sequence
  hALB-FW3
tgctgatgagtcagctgaaaa

SEQ ID NO: 75 - DNA, 21 bp, Artificial sequence
  hALB-Rev3
tcagccatttcaccataggtt

SEQ ID NO: 76 - DNA, 20 bp, Artificial sequence
  GAPDH-human-F
aatcccatcaccatcttcca

SEQ ID NO: 77 - DNA, 20 bp, Artificial sequence
  GAPDH-human-R
tggactccacgacgtactca

SEQ ID NO: 78 - DNA, 24 bp, Artificial sequence
  Hprt-human-F
actttgctttccttggtcaggcag

SEQ ID NO: 79 - DNA, 24 bp, Artificial sequence
  Hprt-human-R
ggcttatatccaacacttcgtggg

SEQ ID NO: 80 - DNA, 23 bp, Artificial sequence
  MYH6-FW
tctccgacaacgcctatcagtac

SEQ ID NO: 81 - DNA, 21 bp, Artificial sequence
  MYH6-Rev
gtcacctatggctgcaatgct

SEQ ID NO: 82 - DNA, 18 bp, Artificial sequence
  FoxA2-human-F
gggagcggtgaagatgga

SEQ ID NO: 83 - DNA, 22 bp, Artificial sequence
  FoxA2-human-R
tcatgttgctcacggaggagta

SEQ ID NO: 84 - DNA, 20 bp, Artificial sequence
  Oct-4-human-F
agtgagaggcaacctggaga

SEQ ID NO: 85 - DNA, 20 bp, Artificial sequence
  Oct4-human-R
acactcggaccacatccttc

SEQ ID NO: 86 - DNA, 22 bp, Artificial sequence
  Hprt-F
ttgctcgagatgtcatgaagga

SEQ ID NO: 87 - DNA, 24 bp, Artificial sequence
  Hprt-R
agcaggtcagcaaagaacttatag

SEQ ID NO: 88 - DNA, 21 bp, Artificial sequence
  GAPDH-F
gtgttcctacccccaatgtgt

SEQ ID NO: 89 - DNA, 24 bp, Artificial sequence
  GAPDH-R
attgtcataccaggaaatgagctt

SEQ ID NO: 90 - DNA, 18 bp, Artificial sequence
  Oct-4
tggcgtggagactttgca

SEQ ID NO: 91 - DNA, 23 bp, Artificial sequence
  Oct-4
gaggttccctctgagttgctttc

SEQ ID NO: 92 - DNA, 29 bp, Artificial sequence
  BMP-4
gttcctggacacctcatcacacgactact

SEQ ID NO: 93 - DNA, 27 bp, Artificial sequence
  BMP-4
gtaacgatcggctgattctgacatgct

SEQ ID NO: 94 - DNA, 25 bp, Artificial sequence
  SOX17
tgaaaggcgaggtggtggcgagtag

SEQ ID NO: 95 - DNA, 29 bp, Artificial sequence
  SOX17
caacgccttccaagacttgcctagcatct

SEQ ID NO: 96 - DNA, 24 bp, Artificial sequence
  FOXA2
cctacgccaacatgaactcgatga

SEQ ID NO: 97 - DNA, 29 bp, Artificial sequence
  FOXA2
gtagaaagggaagaggtccatgatccact

SEQ ID NO: 98 - DNA, 22 bp, Artificial sequence
  VEGFR
acattggtggtggctgactctc

SEQ ID NO: 99 - DNA, 20 bp, Artificial sequence
  VEGFR
cctctccttcggctggcatc

SEQ ID NO: 100 - DNA, 4238 bp, Artificial sequence
  GFP with PGK-NEO selection (C-terminal)
cggccacgatgcgtccggcgtagaggatctgaagatcagcagttcaacctgttgatagtacgtactaagctctcatgtttcacgtactaagctctcatgtttaacgtactaagctctcatgtttaacgaactaaaccctcatggctaacgtactaagctctcatggctaacgtactaagctctcatgtttcacgtactaagctctcatgtttgaacaataaaattaatataaatcagcaacttaaatagcctctaaggttttaagttttataagaaaaaaaagaatatataaggcttttaaagcttttaaggtttaacggttgtggacaacaagccagggatgtaacgcactgagaagcccttagagcctctcaaagcaattttgagtgacacaggaacacttaacggctgacatgggaattagcttcacgctgccgcaagcactcagggcgcaagggctgctaaaggaagcggatagacgtcaggtggcacttttcggggaaatgtgcgcggaacccctatttgtttatttttctaaatacattcaaatatgtatccgctcatgagacaataaccctgataaatgcttcaataatattgaaaaaggaagagtatgagtattcaacatttccgtgtcgcccttattcccttttttgcggcattttgccttcctgtttttgctcacccagaaacgctggtgaaagtaaaagatgctgaagatcagttgggtgcacgagtgggttacatcgaactggatctcaacagcggtaagatccttgagagttttcgccccgaagaacgttttccaatgatgagcacttttaaagttctgctatgtggcgcggtattatcccgtgttgacgccgggcaagagcaactcggtcgccgcatacactattctcagaatgacttggttgagtactcaccagtcacagaaaagcatcttacggatggcatgacagtaagagaattatgcagtgctgccataaccatgagtgataacactgcggccaacttacttctgacaacgatcggaggaccgaaggagctaaccgcttttttgcacaacatgggggatcatgtaactcgccttgatcgttgggaaccggagctgaatgaagccataccaaacgacgagcgtgacaccacgatgcctgcagcaatggcaacaacgttgcgcaaactattaactggcgaactacttactctagcttcccggcaacaattaatagactggatggaggcggataaagttgcaggaccacttctgcgctcggcccttccggctggctggtttattgctgataaatctggagccggtgagcgtgggtctcgcggtatcattgcagcactggggccagatggtaagccctcccgtatcgtagttatctacacgacggggagtcaggcaactatggatgaacgaaatagacagatcgctgagataggtgcctcactgattaagcattggtaacccagcccgcctaatgagcgggcttttttttgaacaaaaggctgcagctggacttctagagctgattatgatattccaactactgcaagcgagaatctttattttcagggcgccgccaaattcaaagaaaccgctgctgctaaattcgaacgccagcacatggacagcggaggtggaggttcgagcggtccctcgggttcgtcgagcctggaagttctgttccaggggcccctgtcgtcgagcggtccctcgggttcgatggtgagcaagggcgaggagctgttcaccggggtggtgcccatcctggtcgagctggacggcgacgtaaacggccacaagttcagcgtgtccggcgagggcgagggcgatgccacctacggcaagctgaccctgaagttcatctgcaccaccggcaagctgcccgtgccctggcccaccctcgtgaccaccctgacctacggcgtgcagtgcttcagccgctaccccgaccacatgaagcagcacgacttcttcaagtccgccatgcccgaaggctacgtccaggagcgcaccatcttcttcaaggacgacggcaactacaagacccgcgccgaggtgaagttcgagggcgacaccctggtgaaccgcatcgagctgaagggcatcgacttcaaggaggacggcaacatcctggggcacaagctggagtacaactacaacagccacaacgtctatatcatggccgacaagcagaagaacggcatcaaggtgaacttcaagatccgccacaacatcgaggacggcagcgtgcagctcgccgaccactaccagcagaacacccccatcggcgacggccccgtgctgctgcccgacaaccactacctgagcacccagtccgccctgagcaaagaccccaacgagaagcgcgatcacatggtccttaaggagttcgtgaccgccgccgggatcactctcggcatggacgagctgtacaagtaatgatctagagtcgagttaattaagaattccgccccccccctctccctcccccccccctaacgttactggccgaagccgcttggaataaggccggtgtgcgtttgtctatatgttattttccaccatattgccgtcttttggcaatgtgagggcccggaaacctggccctgtcttcttgacgagcattcctaggggtctttcccctctcgccaaaggaatgcagggtctgttgaatgtcgtgaaggaagcagttcctctggaagcttcttgaagacaaacaacgtctgtagcgaccctttgcaggcagcggaaccccccacctggcgacaggtgcctctgcggccaaaagccacgtgtataagatacacctgcaaaggcggcacaaccccagtgccacgttgtgagttggatagttgtggaaagagtcaaatggctctcctcaagcgtattcaacaaggggctgaaggatgcccagaaggtaccccattgtatgggatctgatctggggcctcggtgcacatgctttacatgtgtttagtcgaggttaaaaaaacgtctaggccccccgaaccacggggacgtggttttcctttgaaaaacacgatgataatatggccacaacctgttacattgcacaagataaaaatatatcatcacgaacagtaaaactgtctgcttacataaacagtaatacaaggggtgttatgggatcggccattgaacaagatggattgcacgcaggttctccggccgcttgggtggagaggctattcggctatgactgggcacaacagacaatcggctgctctgatgccgccgtgttccggctgtcagcgcaggggcgcccggttctttttgtcaagaccgacctgtccggtgccctgaatgaactgcaggacgaggcagcgcggctatcgtggctggccacgacgggcgttccttgcgcagctgtgctcgacgttgtcactgaagcgggaagggactggctgctattgggcgaagtgccggggcaggatctcctgtcatctcaccttgctcctgccgagaaagtatccatcatggctgatgcaatgcggcggctgcatacgcttgatccggctacctgcccattcgaccaccaagcgaaacatcgcatcgagcgagcacgtactcggatggaagccggtcttgtcgatcaggatgatctggacgaagagcatcaggggctcgcgccagccgaactgttcgccaggctcaaggcgcgcatgcccgacggcgaggatctcgtcgtgacccatggcgatgcctgcttgccgaatatcatggtggaaaatggccgcttttctggattcatcgactgtggccggctgggtgtggcggaccgctatcaggacatagcgttggctacccgtgatattgctgaagagcttggcggcgaatgggctgaccgcttcctcgtgctttacggtatcgccgctcccgattcgcagcgcatcgccttctatcgccttcttgacgagttcttctgactcgagttgccctcatctgttacgccggcggtagccggccagcctcgcagagcaggattcccgttgagcaccgccaggtgcgaataagggacagtgaagaaggaacacccgctcgcgggtgggcctacttcacctatcctgcccggctgacgccgttggatacaccaaggaaagtctacacgaaccctttggcaaaatcctgtatatcgtgcgaaaaaggatggatataccgaaaaaatcgctataatgaccccgaagcagggttatgcagcggaaaa

SEQ ID NO: 101 - DNA, 1500 bp, Homo sapiens
atacttgggctcaaaagtcgtctttggaccactttcagatcagtctggtggaaacggtagtgtgagcgctatgctacttgagactgcgtttgaaaatctctttcacgttcccaaatcaaagccactttgaggtttaagaatgataaccacaggtgaatgccttactctttccacgagccaggcctttcctttgcatgacgcagaccggcggctgagacccgtcctgaggccccgcctttcattcggtttatgtggccccgcgcagttcacgcagttttctccgttcttaggcaaccagctcgtgggaaattcactccagaaaagcgtgcgccatatcattattttgcgattcaacaaactttttcaactgttgttcaggaactagattccagatagatcttgttgtgttcggccttcctagaaattccttttccagaggaagaagatccgggttgggaagagtgcgtgactatggccccgggctcattgaaagactcctccccacaaaagtttagggctgatactaaacgaagctatggagccatgcccacacaaatactccccctttacccgaattgtggggcctggactgtgaaggccttcgctgcaagagcgggcactggcgaacttcagtgcacgccgcggccgagaacggatgcagggcgggggatggctgagccgcctgatccttgcagagaacctgcaggggccctcggagggtatcccctgcgtccaagggagcgcccctccttttcagcactcgggggaactgagggcgacgtgccagccccgcactcaactttccccttccctgcaggcacagagttggccggcgggggcagaggaggagctgggtctccactgcgcccgtttaaacctggccaggggctgcgtttcctccccccaccccacgacgatcctttcttagtcttcgcttttcaacccaatcgttaatcattcggaacgcgcgggcggggagcggcgaggagggcgagctcggggttcgccgccgccgccgccgccgcgcgcgcgcgctcaggaagcggtgtggctgtcaccccctcccgggcctcctcccccctccttcctgctttgctccccctccttcctcccctcctccccgctccgccgcccgcgcccagtgtatctactccctccccacgtcactcgccagcgcgccatgcaaatcaccgccgccgccggctcccattggccgcggcgcgctcatttaatggcagcccgggcccggcgtatggctgctgggccccgcgcgccgccggccccgcgtgcgcctccgctccgagcgcacggccccgggcaggcagcgggcagcccatcccgggctcggcggccccggctctccggccctctccgcgagcccgcgctcctcccgctgtccccgggcccctccctggctgcaccgtaatcgccccctgcaggcccccctgcgcctccccccccccgccactggcgcctggcttcccccgggcacctgggacc

SEQ ID NO: 102 - DNA, 6658 bp, Homo sapiens
atacttgggctcaaaagtcgtctttggaccactttcagatcagtctggtggaaacggtagtgtgagcgctatgctacttgagactgcgtttgaaaatctctttcacgttcccaaatcaaagccactttgaggtttaagaatgataaccacaggtgaatgccttactctttccacgagccaggcctttcctttgcatgacgcagaccggcggctgagacccgtcctgaggccccgcctttcattcggtttatgtggccccgcgcagttcacgcagttttctccgttcttaggcaaccagctcgtgggaaattcactccagaaaagcgtgcgccatatcattattttgcgattcaacaaactttttcaactgttgttcaggaactagattccagatagatcttgttgtgttcggccttcctagaaattccttttccagaggaagaagatccgggttgggaagagtgcgtgactatggccccgggctcattgaaagactcctccccacaaaagtttagggctgatactaaacgaagctatggagccatgcccacacaaatactccccctttacccgaattgtggggcctggactgtgaaggccttcgctgcaagagcgggcactggcgaacttcagtgcacgccgcggccgagaacggatgcagggcgggggatggctgagccgcctgatccttgcagagaacctgcaggggccctcggagggtatcccctgcgtccaagggagcgcccctccttttcagcactcgggggaactgagggcgacgtgccagccccgcactcaactttccccttccctgcaggcacagagttggccggcgggggcagaggaggagctgggtctccactgcgcccgtttaaacctggccaggggctgcgtttcctccccccaccccacgacgatcctttcttagtcttcgcttttcaacccaatcgttaatcattcggaacgcgcgggcggggagcggcgaggagggcgagctcggggttcgccgccgccgccgccgccgcgcgcgcgcgctcaggaagcggtgtggctgtcaccccctcccgggcctcctcccccctccttcctgctttgctccccctccttcctcccctcctccccgctccgccgcccgcgcccagtgtatctactccctccccacgtcactcgccagcgcgccatgcaaatcaccgccgccgccggctcccattggccgcggcgcgctcatttaatggcagcccgggcccggcgtatggctgctgggccccgcgcgccgccggccccgcgtgcgcctccgctccgagcgcacggccccgggcaggcagcgggcagcccatcccgggctcggcggccccggctctccggccctctccgcgagcccgcgctcctcccgctgtccccgggcccctccctggctgcaccgtaatcgccccctgcaggcccccctgcgcctccccccccccgccactggcgcctggcttcccccgggcacctgggaccagcacatgcccagcgcacgcggcgcgccgccctgctagaagttgcagcctccgagttggaggccgctgaggaccgagcgcaggaggaaggagacagcgcgcagcggcggccggcgaggagacagcacaccccgggccgggcccagcgcaccgctcccggccccaaaagcggagctgcaacttggccacgactgcacctgtttgcaccgctccgccgagggcgcctgggctgcggtggcggcgaagacggcgaccccgaccgtcggcctctttggcaagtggtttgtgcatcaggagaaactttccacctgcgagccgaaccggcgccgagtgcgtgtgtttctgcctttttttgttgtcgttgcctccacccctccccattcttctctccgctaggacccccccgcccccgtctcactccgtctgaattcctctccgtctccctcccaccccggccgtctatgctccaggccctctcctcgcggtgccggtgaacccgccagccgccccgatgtacagcatgatgatggagaccgacctgcactcgcccggcggcgcccaggcccccacgaacctctcgggccccgccggggcgggcggcggcgggggcggaggcgggggcggcggcggcggcgggggcgccaaggccaaccaggaccgggtcaaacggcccatgaacgccttcatggtgtggtcccgcgggcagcggcgcaagatggcccaggagaaccccaagatgcacaactcggagatcagcaagcgcctgggggccgagtggaaggtcatgtccgaggccgagaagcggccgttcatcgacgaggccaagcggctgcgcgcgctgcacatgaaggagcacccggattacaagtaccggccgcgccgcaagaccaagacgctgctcaagaaggacaagtactcgctggccggcgggctcctggcggccggcgcgggtggcggcggcgcggctgtggccatgggcgtgggcgtgggcgtgggcgcggcggccgtgggccagcgcctggagagcccaggcggcgcggcgggcggcggctacgcgcacgtcaacggctgggccaacggcgcctaccccggctcggtggcggcggcggcggcggccgcggccatgatgcaggaggcgcagctggcctacgggcagcacccgggcgcgggcggcgcgcacccgcacgcgcaccccgcgcacccgcacccgcaccacccgcacgcgcacccgcacaacccgcagcccatgcaccgctacgacatgggcgcgctgcagtacagccccatctccaactcgcagggctacatgagcgcgtcgccctcgggctacggcggcctcccctacggcgccgcggccgccgccgccgccgctgcgggcggcgcgcaccagaactcggccgtggcggcggcggcggcggcggcggccgcgtcgtcgggcgccctgggcgcgctgggctctctggtgaagtcggagcccagcggcagcccgcccgccccagcgcactcgcgggcgccgtgccccggggacctgcgcgagatgatcagcatgtacttgcccgccggcgaggggggcgacccggcggcggcagcagcggccgcggcgcagagccggctgcactcgctgccgcagcactaccagggcgcgggcgcgggcgtgaacggcacggtgcccctgacgcacatctagcgccttcgggacgccggggactctgcggcggcgacccacgagctcgcggcccgcgcccggctcccgccccgccccggcgcggcgtggcttttgtacagacgttcccacattcttgtcaaaaggaaaatactggagacgaacgccgggtgacgcgtgtcccccactcaccttccccggagaccctggcgaccgccgggcgctgacaccagacttgggttttagactgaacttcggtgttttcttgagactttttgtacagtatttatcacctacggaggaagcggaaagcgttttctttgctcgaggggacaaaaaagtcaaaacgaggcgagaggcgaagcccacttttgtataccggccggcgcgctcactttcctccgcgttgcttccggacggcgccgaccgccggagcccaagtgacgcggagctcgtcgcatttgttataaatgtagtaaggcaggtccaagcacttacaagttttttgtagttgttaccgctcttttgggttggtttgttaatttatacaaagagattaccaccaccaccccctccttcagacggcggagttatattctgggttttgtaaaactttatgtatctgagcatttccatttttttttttgggttttgtattatttcttgtaaatgcattgtgaaaaattttattttcggcgttgcaatgcggggaggagaagtcagattatgtacatagttttctaaaaagcctttcttctaaaaacgaaaaaagaccccccacccaaaatgtttcgagtcaacaaatttaagagacagagcccattttctccataaatttgtaacatgctatttttatgtgcatgttttatgagttcaaaatgcaatgaggaaatctgacagggaaattatctgtatgaactaaaagtaagggaaccccggggaatgggaggacaggatttttcaaggaacctttttcaatgaaagagaaggaagttaaaacctataggttattttgtagagctgagtgttaatacgggccgagaaataaaagtatcttctgctccggctgtttcactgcggacggctggggctgctgcgcgttaccttgctgcaagcggggcgccttccacctggctgggggtctgcgccacagtttggtccagaggagggaggaggaagggaagaccccagtggtgggaccctggaccaggccatggatgaaggacaaagaccagggcaggtcacgggtttcccaattccccagcaattaagatttcgagcagaatttatctaaatgtgtttcaaggaaacacaatcgctgaaccaaaacgtactgcagccgagccccctccgtccatcctctgcccctccccctggcttctttctcttgggaaaacgggcaaaataattgtgctggattctcacacacacagaaatatcgaccatcaccctcccccgcgtgaactgggatgcaagttgctaaccgatgtgaacgcaaaatgccttgttcattattcctgacgagatcttgaggttgtttgatgctttaaattttttaattatattattttctaggtgtttattggtacattgcagttttttttttgaaatttaaaaatttctgtaaaactttgtcttcaagtaatctgacagcattaaatattgcatttaaaaattatactgtagcaaatacatttaaaaattaatcacaacgttaagatgaaattatatttttggaaaaaaaaaacacttgaagcccagatggaaatacgtttatttcagcagccttaggtttcccctcgctttctcaacacccttccttgtcctggagtatggactgtccgtccaaaagtgagcctatgctataagtttaatgagaaccgaattcagcctgcattcgagaatagctttaagtataatgctgatctgacaattgacgtgtaatttgggaagtcattttgataattttgcttaaaccactcattcgttaaagtgattacaaaaaagttcaagaatgatgtccactgctttctaacaagataataaaccccccccctcttttctttttctttatttttatttcttttagctatttgatcctttctgaagcagttgtttctggaagagtctgtgcgcccatggatggctgagcaccactacgacttagtccgggataagggcctccccagtcctctccgggagatgatttgggaaattttataatgcttgttctgttaactcaccgggaccttgagggtccaatgggaccttgagggttttctctgaaatatacaaacttaaaggactctctctgaggttctttgactgacgtccactctcagtctggcccctgtgctcccctgtgtgtaccctggagtttctgtgtccaattgttggcatctaggtcttggctcaagattaggatgtgggccccactttagaggcacagactatgaaaagctgagttagtgcgcccgggacgccaggcaagcagcttttacagtttggcatcttattgcaggtgcttcgtgcacagtcagctgaaatagccaatgccaggtgctccaaccaccttatttccttgttttgttgattagaacaacacagaaaaaagcaaatataaatttttaatgactccatttaaaaatatcacagggtgggggcaaggaaattagctgagattcatctcaggattgagattctatccccccttccccgcccccagcagtgtcgctccaattcaaattagtggagaaaagattacagtaggccctgagccgactgtgaattcggtgcttggccaaggtaacactcatcgtattcacggagtgaaatactatatgatgatagttattatattatatgacgacttcattcacttcccaaatcacagggtggtgcttctgtcgcttagtccaattatgtttgcaacccgtgtagggaaggcggataggagtctttgaggcctagtgcaaagtttgcatcagtttctgcgggggcgacagtgtgacttcgtaaatctgccattgcgctcgggccctgccctccaaactgagggtaggagggtttacttgagggtttttttgctttgttttgttctgtttttgccttgttttgtttttcaactcacccgccccttttgttgttgagattttgacgtccccttccccggagaaacccacccgtaacgtactagatggattagttttaaagaagactcgggcacagcgtgatctccagatgcgcgtcgggagcgtgactgataggtctattaaaatcacgcgtgtgggagaacggcactcatgctcccgcgtttcattcccccggcaaagactgggcgccgcagatttctgtctccggaaaattccagttaattcaagaaacccatccccggacgtgtgcccgcccccccccgaaggctcgcttcaggccagcccggactccagcgccccctcgaccccgtcgggctccggccgactcccgccccctccccacc

SEQ ID NO: 103 - DNA, 1500 bp, Mus musculus
aataagaaggtagctgaaaactaagtttatgacctagatgtttataaaaatatgaaacgatgtttcccttctagcacaattctatattatttgatgagttttctagtaagtgctgaatggcctgaaatgaaagctcaatcgggctgagggctgtactgtgctgtaacaacctgagataaaaaaaaataataataaaataaaataaaccactgtaataatcatagcaagggagcaacggcgtcaggaaattcacagcctcagatgtttttgttagtgggggggggggctgtcatatgttcaccgtccaacatattggaacacctgtattcttgctattatccgggttatctgtcatcagaagagcctctggattacacgcgaggcggtctgcaggcatctgaccaggcttgctttacccaccagcaacctcccgaagcacctagatcttagaagtagaaactctatcctctcccctctgtaccccgccccaggatatctgaagaacttgtagactctaaaggtctttctggaagaagcctttacaataactccccccccctttttttttttggacatgatggtctgatcccaagtagcctggggtggggttggaaatctcttatacatcccggaatcatatttgttctgagattcatggattacggccatttgtgtatgtcttgatcatccccagaactgccctttctttttcacaacatacgaagaaacaaaaacaacaacatacaaaaaggcggccctgtcactggaccttccaattccgtttcagcgcccgcaccccacccccaccctcgcaaacccgagttcacacgattttcaaaatcctttggcaaacagcttctgggagaatcgcttcagaaaagcataggctaggtaggtattcttttgctgtttccacaaacttctttttactgtcggagtaacaagattccagctagatcttggttttgaccttcgcagaaattcaagaggatatagagtaaattggcacctgactataacactccgctccattaaaagacaccccctcccccaagaaagttcggggtagattagggagctaggagcgtagcaccacacaaaaaccgctgcacctcttgccacggagacccgaattatagatcccgaatctgtaaaggcctttgcaggctctgagaatgcaccgagcgccaggggtgggagagactgagccgccccgcttggcctgaaacccagcagaggtactttgggcctaagccccccccccccgggaggatctcccccgcaccgctgttattctgcactcccggctgagctgagtgcaaagtgaggcctctatctccaactttccccttcccagcgggcacagagttggctggctggggacaggggaggagctgggtctccaatgagcgcatttaaacacgacccagggctgtattccccccgcctcccccgacagcgattctttcttcctctgggttttcaacccaatcgttaatc

SEQ ID NO: 104 - DNA, 6931 bp, Mus musculus
aataagaaggtagctgaaaactaagtttatgacctagatgtttataaaaatatgaaacgatgtttcccttctagcacaattctatattatttgatgagttttctagtaagtgctgaatggcctgaaatgaaagctcaatcgggctgagggctgtactgtgctgtaacaacctgagataaaaaaaaataataataaaataaaataaaccactgtaataatcatagcaagggagcaacggcgtcaggaaattcacagcctcagatgtttttgttagtgggggggggggctgtcatatgttcaccgtccaacatattggaacacctgtattcttgctattatccgggttatctgtcatcagaagagcctctggattacacgcgaggcggtctgcaggcatctgaccaggcttgctttacccaccagcaacctcccgaagcacctagatcttagaagtagaaactctatcctctcccctctgtaccccgccccaggatatctgaagaacttgtagactctaaaggtctttctggaagaagcctttacaataactccccccccctttttttttttggacatgatggtctgatcccaagtagcctggggtggggttggaaatctcttatacatcccggaatcatatttgttctgagattcatggattacggccatttgtgtatgtcttgatcatccccagaactgccctttctttttcacaacatacgaagaaacaaaaacaacaacatacaaaaaggcggccctgtcactggaccttccaattccgtttcagcgcccgcaccccacccccaccctcgcaaacccgagttcacacgattttcaaaatcctttggcaaacagcttctgggagaatcgcttcagaaaagcataggctaggtaggtattcttttgctgtttccacaaacttctttttactgtcggagtaacaagattccagctagatcttggttttgaccttcgcagaaattcaagaggatatagagtaaattggcacctgactataacactccgctccattaaaagacaccccctcccccaagaaagttcggggtagattagggagctaggagcgtagcaccacacaaaaaccgctgcacctcttgccacggagacccgaattatagatcccgaatctgtaaaggcctttgcaggctctgagaatgcaccgagcgccaggggtgggagagactgagccgccccgcttggcctgaaacccagcagaggtactttgggcctaagccccccccccccgggaggatctcccccgcaccgctgttattctgcactcccggctgagctgagtgcaaagtgaggcctctatctccaactttccccttcccagcgggcacagagttggctggctggggacaggggaggagctgggtctccaatgagcgcatttaaacacgacccagggctgtattccccccgcctcccccgacagcgattctttcttcctctgggttttcaacccaatcgttaatcattcggagcgcgcgggcggggagaggcaaagggggcgagctctgggttcgccgccgccgccgccgccgtcgccgccgcgcgcgcgcgctcaggaagcagtgtggctgtgaccccgcccccccgcgcccccttttccccctccttcctgcccttgttccccccctctctcctcctccacctccttgctccgccgcccgcgcccagtgtatctactccctccccacgtcactcgccagcgcgccatgcaaatcaccgccgccgccggttcccattggccgcggcgcgctcatttaatggcagcccgggcccggcgtatggctgctgggccccccgcgccaccggccccgcgtgcgcctccgctccgagcgcacggcctcgggcaggcagcggacagcttgtcctgggcacagcggcacagctctctggctctctgctcgcgttggcactcccactgctgtccctaaccccctccctggctgcaccgcgatcgccccctccgaacccccctccgagtccccctcagcgcctggctccccccaggcacctgggaccagcacatgcccagcgcacgcggcgcaccgccttgctagaagttgcggtcccagagttggaagccgccaaggaagccagcacaggaacggagacttcgagccgacaagaggaggcagcgaaccctgcgtcgggcccaggggcaccgcttcagacccagaaagtggagcctcaacttggccacgactgcacctgtttgcacagttcagccctgagtgaccggacggcagcaatcaacctggccatcggcctctttggcaagtggtttgtgcaccgggagaaactttccacctgcgagctggacccgcgctaagtgcgtgtgcttttgcctcttttttgttgttgttgttgttgtggcctccacccaacccccttctctccgctaggcacccaccgcacacacacccccccccccagtctctctgggctgatcctctctccacccacccacccccacccggccgtctatgctccaggccctctctttgcggtaccggtgaacccgctagccgcccagatgtacagcatgatgatggagaccgacctgcactcgcccggcggcgcccaggcgcccacgaacctctcgggcccggccggggcgggcgggggcggcggtgggggcgggggcggcggcggcggcgggggcaccaaggccaaccaggatcgggtcaagcggcccatgaacgccttcatggtgtggtcccgcggacagcggcgcaagatggcccaggaaaaccccaagatgcacaactcggagatcagcaagcgcctcggggccgagtggaaggtcatgtccgaggccgagaagcggccgttcatcgacgaggccaagagactgcgcgcgctgcacatgaaggaacacccggattacaagtaccggccgcgccgcaagaccaagacgctgctcaagaaggacaagtactcgctggccggcgggctgctagcggccggcgcgggtggcggcggcgcggccgtggccatgggtgtgggcgtgggcgtcggggcggcggcggtgggccagcgcttggagagcccaggcggcgcggcgggaggaggctacgcgcatgtcaacggctgggctaacggcgcctaccccggctcggtggccgcggcggctgcggccgcggccatgatgcaggaggcacagctggcctacgggcagcacccaggcgcgggcggcgcgcacccgcacgcacacccggcgcacccgcacccgcaccatccgcacgcgcatcctcacaacccgcagcccatgcaccgctacgacatgggcgcgctgcagtacagccccatctccaactctcagggctacatgagcgcgtcgccttcgggctacggcggcatcccttacggcgccgcggccgccgccgccgccgctgcgggcggcgcgcaccagaactcggcggtggcggcagcggcagccgcggcagccgcgtcgtcgggggccctgggcgccctcggatctctggtcaagtcggagccgagcggcagtccgccggccccggctcactcacgggcaccgtgtcccggggacctgcgcgagatgatcagcatgtacctgcccgccggcgagggtggcgacccggcggcggcagcggctgcggcggcccaaagccggctgcactcgctgccacagcactaccagggcgcgggcgcgggcgtcaacggcacggtgcccctgacgcacatctagcgccgcggggacgccggggacactgcggcttaaggccggcgccccggcgacgaagagcgaggcctgcgccccagcctccagagcccgactttgtaccgaggtccccgcgctctcgataaaaggccgctctggagagccgagcgccaggtgacatctgcccccatcaccttccccaggactccgaggcgctgacaccagactggcctcttagactgaactttggtgttttcatgagaccttttgtacagtatttatcgtccgcagaggaggcacacagcgttttctcggcttcggaggacaaaagacaaaaacccagcgaggcgatgccaacttttgtatgactgccggctctgtaactttttccggggtttacttcccgccagctcttctgcctgaggccgagtgacggactcgagcccttctcacttgttataaatctaagtaaggcagatccaaacatttacaagttttttgtagttgttaccgctcttttgggttggttggttaatttataccgcaatcccctctcagacggtggagttatattctgggttttgtaaatctctgtatccgagcatttccaattttttgttttgttttgtattatttcttgtaaatgcgttgtgacatttttattttaggcgttgcgatacggggggaagaggagtcggatgttgtacatagcctgcaagtctttcatctaaaagcaaaaaacaaagagagatacccccaaaatgcatcaaatttgaatcaatacatttaagagagaaaagcccgtttccctgtgaaatcgaaacgtgctaattttatatgcatgttttatgagttcaaaatacaattagcaatctgttggaggagaaattatctgcagggcccaagagtaaggaaatcccaccaagcggagtgcagcgtttccgtgactttattcggtggggaaagagaaatcttaaactccatagattattttgtagagttcaagttgacacagaagggaagtaattacaaaatgcttcctaatggtttagcgttttaactgccatggccctggcttatttttttttgcatttctttcctgtggttctgccttttgcatactgtagcagttttgaggcagctgggtctcagaaggaggatgggttgtgctcagtggtgggacaaggccaaggatagggacaacagccaccgccaagacagcgtgcctttgatttctctgtaattggaattgtaagtgaaattatcttcctgtgcttcaaggaagcaatcctgacccagacctcaccaccacagagtctctcacccaggtcttatcccatcccctcccgattcctctctgggaaaatccaacataattctaccgattttcttacacacacacacacacacacacacacacacactctctcctgtgtgaaccgggatgcagattgccagggaatgtaaacacagaatgctgtgtttatcattcctgaccagatcttgaggttgtttgatgctttaaatatttttaattatattttttctaggtgtttattggtatattgcaggtcccccccccctggaatttaaagttccctgtaaaactttgtcttcaagtaatctgacagcattaaatattgcatttaaaagttatactgtagcaaatatgttttaaaattaatcatgacattagaatgaaattctatttttgaaggaaattttctttaagtccagatggggaatgatactattttcagcatcctttcccctgattttttcccaatttcttttcttggaatgaatatggactagccattcaaaagtggacttaatctagcaattcagtaagaccagagctcaacctacattggagaatatctttcagtataaatgctaatattacaagtgacacgtgtgattttttttaaagtcatttaatgattttgcttaaacccctcattccttaaagtgattgcaagagattcaagaatgacgcccactgctttctgatgaggtaataaaagaacacccctccctttttcctttctttgtttttcttttagggttttgctttgttgtttctagagctgcttagcctaccgcttaggagtccaggagggaggccacactctgtggcagtctaggaagaaatgccccaatagcctcagggaaattctagagagtgtttagagtccaacccacttcccccttaaaacgccaagacctttgcagactggcccccaacaccaccctgctctttatttagggagaatcaaaggtggccacactcacctctgttttgcctgggcttctggagttcctggtgtgccttggctgggggcaactaaaccagggctcagtgcataggagttatggccactttaagtgaagcaccccacataaagttagtcatcttgttagtatcagacagctcagcccccacccccaccccaagactttcagaggtttgtgctccctacttgagctctacccagtgaacaagaactctttgtgccaggctttcaagccaccttcctttgggttctactgatgtgaaagacaaggagaaattctctaatgacttaatttgaaaacaatacagaggggggggggcttctctcaagatcgaggccagatccagacagacaaactttctccattttaaataaatggagagaattttctcctaggtcttacttagagcccaactcaagggtagtttcagtaccttaccgagccatgcacatttttattcaagtgagggttttttgttgttgttgtttttgttttttttttttatggctatgattaccagataactcacttccaaagttcgggcggtgtttccttctattagtgcgatcttgtttaaaactctgtgtggagaatggggcaggatctttgcgaagcgtggataaagtttgcataacttcgtgtagggcgcctgggtggcttctaacccacgggtaaactgagcgggatggtttgcctggtggtcgccccccctccgcccccttgcccctctccctccctctctcctattcccctttctttgctcacttaaaaaaaaaaaactcactggcccctttttattgttgccactgagactttgacaccctccctcaaacgcactagtaggcagatgaaacgaattaatttttttaaaggagttgcgggcgcagcgcgcctgatctgcagatgtgtcgggatgtg

SEQ ID NO: 105 - DNA, 16 bp, Artificial Sequence
  primer Sox1 fw
tcccccgcgtgaactg

SEQ ID NO: 106 - DNA, 20 bp, Artificial Sequence
  primer Sox1 Rv
caaggcattttgcgttcaca

1. An in vitro method of determining an effect of an agent on mammalian embryonic development, the method comprising:
a) providing at least seven types of reporter cells, wherein each type of reporter cell comprises a reporter sequence operatively linked to a different regulatory element of a gene;
b) contacting the at least seven type of reporter cells with the agent;
c) comparing the expression of the reporter sequences in the at least seven types of reporter cells contacted with the agent to a corresponding cell not contacted with the agent; and
d) determining that the agent has an effect on mammalian embryonic development if in step c) a difference in expression of the reporter sequences is detected between the reporter cells contacted with the agent and the corresponding cells not contacted with the agent for at least one type of reporter cell; and,
wherein the different regulatory elements for the at least seven types of reporter cells comprise:
a regulatory element of the OCT4 gene comprising a polynucleotide sequence that has at least 60% sequence identity with at least one of SEQ ID NO: 1 and SEQ ID NO: 21;
a regulatory element of the BMP4 gene, comprising a polynucleotide sequence that has at least 60% sequence identity at least one of SEQ ID NO: 2 and SEQ ID NO: 22;
a regulatory element of the MYH6 gene, comprising a polynucleotide sequence that has at least 60% sequence identity with at least one of SEQ ID NO: 3 and SEQ ID NO:23;
a regulatory element of the PAX6 gene, comprising a polynucleotide sequence that has at least 60% sequence identity with at least one of SEQ ID NO: 4 and SEQ ID NO: 24;
a regulatory element of the FOXA2 gene, comprising a polynucleotide sequence that has at least 60% sequence identity with at least one of SEQ ID NO: 5 and SEQ ID NO: 25;
a regulatory element of the AFP gene, comprising a polynucleotide sequence that has at least 60% sequence identity with at least one of SEQ ID NO: 8 and SEQ ID NO: 28; or
a regulatory element of the SOX1 gene, comprising a polynucleotide sequence that has at least 60% sequence identity with at least one of SEQ ID NO: 101 or SEQ ID NO: 103.

2. The method according to claim 1, wherein the method comprises contacting the agent in step b) with at least one additional type of reporter cells selected from the group consisting of:
a regulatory element of the SOX17 gene, comprising a polynucleotide sequence that has at least 60% sequence identity with at least one of SEQ ID NO: 6 and SEQ ID NO: 26;
a regulatory element of the ALB gene, comprising a polynucleotide sequence that has at least 60% sequence identity with at least one of SEQ ID NO: 7 and SEQ ID NO: 27;
a regulatory element of the Ck18 gene comprising a polynucleotide sequence that has at least 60% sequence identity with at least one of SEQ ID NO: 9 and SEQ ID NO: 29; and
a regulatory element of the Vegfr1 gene comprising a polynucleotide sequence that has at least 60% sequence identity with at least one of SEQ ID NO: 10 and SEQ ID NO: 30.

3. The method according to claim 1, wherein the reporter sequence is a gene encoding a protein.

4. The method according to claim 1, wherein the agent is a pharmaceutical agent, a chemical agent, a dye, an agrochemical agent, a cosmetic, a plasticizer or a food-ingredient.

5. The method according to claim 1, wherein the agent is a polypeptide, a peptide, a nucleic acid, a small molecule, or a natural product.

6. A kit of parts comprising:
at least seven types of reporter cell, wherein each type of reporter cell comprises a reporter sequence operatively linked to a regulatory element of a gene and wherein the at least seven type of reporter cells each comprise:
a regulatory element of the OCT4 gene comprising a polynucleotide sequence that has at least 60% sequence identity with at least one of SEQ ID NO: 1 and SEQ ID NO: 21;
a regulatory element of the BMP4 gene, comprising a polynucleotide sequence that has at least 60% sequence identity at least one of SEQ ID NO: 2 and SEQ ID NO: 22;
a regulatory element of the MYH6 gene, comprising a polynucleotide sequence that has at least 60% sequence identity with at least one of SEQ ID NO: 3 and SEQ ID NO:23;
a regulatory element of the PAX6 gene, comprising a polynucleotide sequence that has at least 60% sequence identity with at least one of SEQ ID NO: 4 and SEQ ID NO: 24;
a regulatory element of the FOXA2 gene, comprising a polynucleotide sequence that has at least 60% sequence identity with at least one of SEQ ID NO: 5 and SEQ ID NO: 25; or
a regulatory element of the AFP gene, comprising a polynucleotide sequence that has at least 60% sequence identity with at least one of SEQ ID NO: 8 and SEQ ID NO: 28.
a regulatory element of the SOX1 gene, comprising a polynucleotide sequence that has at least 60% sequence identity with at least one of SEQ ID NO: 101 or SEQ ID NO: 103.

7. The kit of parts according to claim 6, wherein the kit further comprises at least one additional type of reporter cell selected from the group consisting of:
a regulatory element of the SOX17 gene, comprising a polynucleotide sequence that has at least 60% sequence identity with at least one of SEQ ID NO: 6 and SEQ ID NO: 26;
a regulatory element of the ALB gene, comprising a polynucleotide sequence that has at least 60% sequence identity with at least one of SEQ ID NO: 7 and SEQ ID NO: 27;
a regulatory element of the Ck18 gene comprising a polynucleotide sequence that has at least 60% sequence identity with at least one of SEQ ID NO: 9 and SEQ ID NO: 29; and
a regulatory element of the Vegfr1 gene comprising a polynucleotide sequence that has at least 60% sequence identity with at least one of SEQ ID NO: 10 and SEQ ID NO: 30.

8. A combination of at least seven transgenic non-human mammals, comprising at least one cell comprising a reporter sequence operatively linked to a different regulatory element and wherein the regulatory element is selected from:
a regulatory element of the OCT4 gene comprising a polynucleotide sequence that has at least 60% sequence identity with at least one of SEQ ID NO: 1 and SEQ ID NO: 21;
a regulatory element of the BMP4 gene, comprising a polynucleotide sequence that has at least 60% sequence identity at least one of SEQ ID NO: 2 and SEQ ID NO: 22;
a regulatory element of the MYH6 gene, comprising a polynucleotide sequence that has at least 60% sequence identity with at least one of SEQ ID NO: 3 and SEQ ID NO: 23;
a regulatory element of the PAX6 gene, comprising a polynucleotide sequence that has at least 60% sequence identity with at least one of SEQ ID NO: 4 and SEQ ID NO: 24;
a regulatory element of the FOXA2 gene, comprising a polynucleotide sequence that has at least 60% sequence identity with at least one of SEQ ID NO: 5 and SEQ ID NO: 25;
a regulatory element of the AFP gene, comprising a polynucleotide sequence that has at least 60% sequence identity with at least one of SEQ ID NO: 8 and SEQ ID NO: 28; and
a regulatory element of the SOX1 gene, comprising a polynucleotide sequence that has at least 60% sequence identity with at least one of SEQ ID NO: 101 or SEQ ID NO: 103.

9. The combination according to claim 8, wherein the combination comprises one or more additional transgenic non-human mammals selected from the group consisting of:
a transgenic non-human mammal comprising a reporter sequence operatively linked to a different regulatory element and wherein the regulatory element is a regulatory element of the SOX17 gene, comprising a polynucleotide sequence that has at least 60% sequence identity with at least one of SEQ ID NO: 6 and SEQ ID NO: 26;
a transgenic non-human mammal comprising a reporter sequence operatively linked to a different regulatory element and wherein the regulatory element is a regulatory element of the ALB gene, comprising a polynucleotide sequence that has at least 60% sequence identity with at least one of SEQ ID NO: 7 and SEQ ID NO: 27;
a transgenic non-human mammal comprising a reporter sequence operatively linked to a different regulatory element and wherein the regulatory element is a regulatory element of the Ck18 gene comprising a polynucleotide sequence that has at least 60% sequence identity with at least one of SEQ ID NO: 9 and SEQ ID NO: 29; and
a transgenic non-human mammal comprising a reporter sequence operatively linked to a different regulatory element and wherein the regulatory element is a regulatory element of the Vegfr1 gene comprising a polynucleotide sequence that has at least 60% sequence identity with at least one of SEQ ID NO: 10 and SEQ ID NO: 30.

10.-11. (canceled)

12. The method according to claim 3, wherein the reporter sequence encodes a protein that is readily detectable.

13. The combination according to claim 8, wherein the transgenic non-human mammals are rodents.
